(19) United States
(12) Patent Application Publication
(10) Pub. No.: US 2023/0220374 A1
(43) Pub. Date: Jul. 13, 2023

(54) METHODS AND COMPOSITIONS FOR SIMULTANEOUS EDITING OF BOTH STRANDS OF A TARGET DOUBLE-STRANDED NUCLEOTIDE SEQUENCE

(71) Applicants: THE BROAD INSTITUTE, INC., CAMBRIDGE, MA (US); PRESIDENT AND FELLOWS OF HARVARD COLLEGE, CAMBRIDGE, MA (US)

(72) Inventors: David R. Liu, Cambridge, MA (US); Andrew Vito Anzalone, Cambridge, MA (US); Jonathan Ma Levy, Cambridge, MA (US); Xin Gao, Cambridge, MA (US); Christopher J. Podracky, Cambridge, MA (US)

(73) Assignees: THE BROAD INSTITUTE, INC., CAMBRIDGE, MA (US); PRESIDENT AND FELLOWS OF HARVARD COLLEGE, CAMBRIDGE, MA (US)

(21) Appl. No.: 18/053,269

(22) Filed: Nov. 7, 2022

Related U.S. Application Data
(63) Continuation of application No. PCT/US2021/031439, filed on May 7, 2021.
(60) Provisional application No. 63/116,785, filed on Nov. 20, 2020.
(60) Provisional application No. 63/022,397, filed on May 8, 2020.

(51) Int. Cl. C12N 15/10; C12N 15/11; C12N 9/12; C12N 9/22

(52) U.S. Cl. CPC C12N 15/102; C12N 15/111; C12N 9/1276; C12N 9/22

(57) ABSTRACT

The present disclosure provides systems, compositions, and methods for simultaneously editing both strands of a double-stranded DNA sequence at a target site to be edited. In some aspects, the systems comprise a first and second prime editor complex, wherein each of the first and second prime editor complexes comprises (1) a prime editor comprising (i) a nucleic acid programmable DNA binding protein (napDNAbp), and (ii) a polypeptide having an RNA-dependent DNA polymerase activity; and (2) a pegRNA comprising a spacer sequence, gRNA core, a DNA synthesis template, and a primer binding site, wherein the DNA synthesis template encodes a desired DNA sequence or a complement thereof, wherein the desired DNA sequence and the complement thereof form a duplex comprising an edited portion which integrates into the target site to be edited. In some aspects, the systems comprise a first, second, third, and fourth prime editor complex, each comprising a prime editor and a PEgRNA. Also provided herein are methods for simultaneously editing both strands of a double-stranded DNA sequence at a target site to be edited. Further provided herein are pharmaceutical compositions, polynucleotides, vectors, cells, and kits.

### RELATED APPLICATIONS AND INCORPORATION BY REFERENCE

[0001] This application claims priority under 35 U.S.C. §§ 120 and 365(c) to and is a continuation of international PCT Application, PCT/US2021/031439, filed on May 7, 2021, which claims priority under 35 U.S.C. § 119(e) to U.S. Provisional Application, U.S. Ser. No. 63/022,397, filed on May 8, 2020, and U.S. Provisional Application U.S. Ser. No. 63/116,785 filed on Nov. 20, 2020, each of which is incorporated herein by reference.

[0002] This U.S. Provisional Application also refers to and incorporates by reference the following applications, namely, U.S. Provisional Application No. 62/820,813, filed Mar. 19, 2019 (Attorney Docket No. B1195.70074US00), U.S. Provisional Application No. 62/858,958 (Attorney Docket No. B1195.70074US01), filed Jun. 7, 2019, U.S. Provisional Application No. 62/889,996 (Attorney Docket No. B1195.70074US02), filed Aug. 21, 2019, U.S. Provisional Application No. 62/922,654, filed Aug. 21, 2019 (Attorney Docket No. B1195.70083US00), U.S. Provisional Application No. 62/913,553 (Attorney Docket No. B1195.70074US03), filed Oct. 10, 2019, U.S. Provisional Application No. 62/973,558 (Attorney Docket No. B1195.70083US01), filed Oct. 10, 2019, U.S. Provisional Application No. 62/931,195 (Attorney Docket No. B1195.70074US04), filed Nov. 5, 2019, U.S. Provisional Application No. 62/944,231 (Attorney Docket No. B1195.70074US05), filed Dec. 5, 2019, U.S. Provisional Application No. 62/974,537 (Attorney Docket No. B1195.70083US02), filed Dec. 5, 2019, U.S. Provisional Application No. 62/991,069 (Attorney Docket No. B1195.70074US06), filed Mar. 17, 2020, and U.S. Provisional Application No. (63/100,548) (Attorney Docket No. B1195.70083U503), filed Mar. 17, 2020. In addition, this U.S. Provisional Application refers to and incorporates by reference International PCT Application Nos.: PCT/US20/23721; PCT/US20/23730; PCT/US20/23713; PCT/US20/23712; PCT/US20/23727; PCT/US20/23724; PCT/US20/23725; PCT/US20/23728; PCT/US20/23732; PCT/US20/23723; PCT/US20/23553; and PCT/US20/23583, each filed on Mar. 19, 2020.

### GOVERNMENT SUPPORT

[0003] This invention was made with government support under grant numbers U01AI142756, RM1HG009490, R01EB022376, and R35GM118062 awarded by the National Institutes of Health. The government has certain rights in the invention.

### REFERENCE TO AN ELECTRONIC SEQUENCE LISTING

[0004] The contents of the electronic sequence listing (B119570091US02-SEQ-TNG.xml; Size: 5,516,092 bytes; and Date of Creation: Nov. 7, 2022) is herein incorporated by reference in its entirety.

### BACKGROUND OF THE INVENTION

[0005] Pathogenic single nucleotide mutations contribute to approximately 50% of human diseases for which there is a genetic component,' according to some estimates. Unfortunately, treatment options for patients with these genetic disorders remain extremely limited, despite decades of gene therapy exploration'. Perhaps the most parsimonious solution to this therapeutic challenge is direct correction of single nucleotide mutations in patient genomes, which would address the root cause of disease and would likely provide lasting benefit. Although such a strategy was previously unthinkable, recent improvements in genome editing capabilities brought about by the advent of the CRISPR/Cas system⁹ have now brought this therapeutic approach within reach. By straightforward design of a guide RNA (gRNA) sequence that contains ˜20 nucleotides complementary to the target DNA sequence, nearly any conceivable genomic site can be specifically accessed by CRISPR associated (Cas) nucleases^{1,2}. To date, several monomeric bacterial Cas nuclease systems have been identified and adapted for genome editing applications¹⁰ . This natural diversity of Cas nucleases, along with a growing collection of engineered variants¹¹⁻¹⁴, offers fertile ground for developing new genome editing technologies.

[0006] While gene disruption with CRISPR is now a mature technique, precision editing of single base pairs in the human genome remains a major challenge³. Homology directed repair (HDR) has long been used in human cells and other organisms to insert, correct, or exchange DNA sequences at sites of double strand breaks (DSBs) using donor DNA repair templates that encode the desired edits¹⁵. However, traditional HDR has very low efficiency in most human cell types, particularly in non-dividing cells, and competing non-homologous end joining (NHEJ) leads predominantly to insertion-deletion (indel) byproducts¹⁶. Other issues relate to the generation of DSBs, which can give rise to large chromosomal rearrangements and deletions at target loci¹⁷, or activate the p53 axis leading to growth arrest and apoptosis^{18,19}.

[0007] Several approaches have been explored to address these drawbacks of HDR. For example, repair of single-stranded DNA breaks (nicks) with oligonucleotide donors has been shown to reduce indel formation, but yields of desired repair products remain low²⁰. Other strategies attempt to bias repair toward HDR over NHEJ using small molecule and biologic reagents²¹⁻²³. However, the effectiveness of these methods is likely cell-type dependent, and perturbation of the normal cell state could lead to undesirable and unforeseeable effects.

[0008] Recently, the inventors, led by Prof. David Liu et al., developed base editing as a technology that edits target nucleotides without creating DSBs or relying on HDR^{4-6,24-27}. Direct modification of DNA bases by Cas-fused deaminase enzymes allows for C•G to T•A, or A•T to G•C, base pair conversions in a short target window (˜5-7 bases) with very high efficiency. As a result, base editors have been rapidly adopted by the scientific community. However, the following factors limit their generality for precision genome editing: (1) “bystander editing” of non-target C or A bases within the target window are observed; (2) target nucleotide product mixtures are observed; (3) target bases must be located 15±2 nucleotides upstream of a PAM sequence; and (5) repair of small insertion and deletion mutations is not possible.

[0009] Therefore, the development of programmable editors that are flexibly capable of introducing any desired single nucleotide change and/or which could install base pair insertions or deletions (e.g., at least 1, 2, 3, 4, 5, 6, 8, 9, 10, 11, 12, 13, 14, 15, 16, 17, 18, 19, 20, 30, 40, 50, 60, 70, 80, 90, 100, or more base pair insertions or deletions) and/or which could alter or modify the nucleotide sequence at a target site with high specificity and efficiency would substantially expand the scope and therapeutic potential of genome editing technologies based on CRISPR.

### SUMMARY OF THE INVENTION

[0010] The present invention describes a new platform for genome editing called “multi-flap prime editing” (including, for example, “dual-flap prime editing” and “quadruple-flap prime editing”) and represents an innovative advancement of “prime editing” or “classical prime editing,” as described by the present inventors in Anzalone, A. V. et al. Search-and-replace genome editing without double-strand breaks or donor DNA. Nature 576, 149-157 (2019), which is incorporated herein by reference. Whereas classical prime editing in various embodiments polymerizes at a nick site a single 3′ flap which becomes integrated into the target nucleic acid on the same strand, the presently described multi-flap prime editing systems involve distinct constructs, systems, and methodologies that, in various embodiments, generate pairs or multiple pairs of 3′ flaps on different strands, which form duplexes comprising desired edits and which become incorporated into target nucleic acid molecules, e.g., at specific loci or edit sites in a genome. In various aspects, the pairs or multiple pairs of 3′ flaps form duplexes because they comprise reverse complementary sequences which anneal to one another once generated by the prime editors described herein. The duplexes become incorporated into the target site by cell-driven mechanisms that naturally replace the endogenous duplex sequences located between adjacent nick sites. In certain embodiments, the new duplex sequences may be introduced at one or more locations (e.g., at adjacent genomic loci or on two different chromosomal locations), and may comprise one or more sequences of interest, e.g., protein-encoding sequence, peptide-encoding sequence, or RNA-encoding sequence. In one embodiment, the new duplex sequences installed by the multi-flap prime editing systems may comprise a recombinase site, e.g., a Bxb1 recombinase attB (38 bp) and/or attP (50 bp) site, or a recombinase site recognized by Hin recombinase, Gin recombinase, Tn3 recombinase, β-six recombinase, CinH recombinase, ParA recombinase, γδ recombinase, ϕC31 recombinase, TP901 recombinase, TG1 recombinase, φBT1 recombinase, R4 recombinase, φRV1 recombinase, φFC1 recombinase, MR11 recombinase, A118 recombinase, U153 recombinase, and gp29 recombinase, Cre recombinase, FLP recombinase, R recombinase, Lambda recombinase, HK101 recombinase, HK022 recombinase, and pSAM2 recombinase.

[0011] The inventors recently developed prime editing which enables the insertion, deletion, or replacement of genomic DNA sequences without requiring error-prone double-strand DNA breaks. Prime editing uses an engineered Cas9 nickase—reverse transcriptase fusion protein (PE1 or PE2) paired with an engineered prime editing guide RNA (pegRNA) that both directs Cas9 to the target genomic site and encodes the information for installing the desired edit. Prime editing proceeds through a multi-step editing process: 1) the Cas9 domain binds and nicks the target genomic DNA site, which is specified by the pegRNA's spacer sequence; 2) the reverse transcriptase domain uses the nicked genomic DNA as a primer to initiate the synthesis of an edited DNA strand using an engineered extension on the pegRNA as a template for reverse transcription—this generates a single-stranded 3′ flap containing the edited DNA sequence; 3) cellular DNA repair resolves the 3′ flap intermediate by the displacement of a 5′ flap species that occurs via invasion by the edited 3′ flap, excision of the 5′ flap containing the original DNA sequence, and ligation of the new 3′ flap to incorporate the edited DNA strand, forming a heteroduplex of one edited and one unedited strand; and 4) cellular DNA repair replaces the unedited strand within the heteroduplex using the edited strand as a template for repair, completing the editing process.

[0012] Efficient incorporation of the desired edit requires that the newly synthesized 3′ flap contains a portion of sequence that is homologous to the genomic DNA site. This homology enables the edited 3′ flap to compete with the endogenous DNA strand (the corresponding 5′ flap) for incorporation into the DNA duplex. Because the edited 3′ flap will contain less sequence homology than the endogenous 5′ flap, the competition is expected to favor the 5′ flap strand. Thus, a potential limiting factor in the efficiency of prime editing may be the efficiency of the invasion of the 3′ flap of the endogenous DNA and the subsequent displacement and replacement of the 5′ flap strand. Moreover, successful 3′ flap invasion and removal of the 5′ flap only incorporates the edit on one strand of the double-stranded DNA genome. Permanent installation of the edit requires cellular DNA repair to replace the unedited complementary DNA strand using the edited strand as a template. While the cell can be made to favor replacement of the unedited strand over the edited strand (step 4 above) by the introduction of a nick in the unedited strand adjacent to the edit using a secondary sgRNA (the PE3 system), this process still relies on a second stage of DNA repair. These DNA repair steps may be particularly inefficient for edits which require equilibration of long 5′ and 3′ flap intermediates or contain long non-homologous regions, such as long insertions or long deletions. Further developments in prime editing would advance the art.

[0013] In various aspects, this Specification describes a multi-flap prime editing system (including, for example, dual prime editing systems and quadruple prime editing systems) that addresses the challenges associated with flap equilibration and subsequent incorporation of the edit into the non-edited complementary genomic DNA strand by simultaneously editing both DNA strands. In the dual-flap prime editing system, for example, two pegRNAs are used to target opposite strands of a genomic site and direct the synthesis of two complementary 3′ flaps containing edited DNA sequence (FIG. 91). Unlike classical prime editing, there is no requirement for the pair of edited DNA strands (3′ flaps) to directly compete with 5′ flaps in endogenous genomic DNA, as the complementary edited strand is available for hybridization instead. Since both strands of the duplex are synthesized as edited DNA, the dual-flap prime editing system obviates the need for the replacement of the non-edited complementary DNA strand required by classical prime editing. Instead, cellular DNA repair machinery need only excise the paired 5′ flaps (original genomic DNA) and ligate the paired 3′ flaps (edited DNA) into the locus. Therefore, there is also no need to include sequences homologous to genomic DNA in the newly synthesized DNA strands, allowing selective hybridization of the new strands and facilitating edits that contain minimal genomic homology. Nuclease-active versions of prime editors that cut both strands of DNA could also be used to accelerate the removal of the original DNA sequence. The quadruple-flap prime editing system, using four pegRNAs, provides similar advantages.

[0014] Like classical prime editing, multi-flap prime editing is a versatile and precise genome editing method that directly writes new genetic information into a specified DNA site using a nucleic acid programmable DNA binding protein (“napDNAbp”) working in association with a polymerase (i.e., in the form of a fusion protein or otherwise provided in trans with the napDNAbp), wherein the prime editing system is programmed with a prime editing (PE) guide RNA (“PEgRNA”) that both specifies the target site and templates the synthesis of the desired edit in the form of a replacement DNA strand by way of an extension (either DNA or RNA) engineered onto a guide RNA (e.g., at the 5′ or 3′ end, or at an internal portion of a guide RNA). The replacement strand containing the desired edit (e.g., a single nucleobase substitution) shares the same sequence as the endogenous strand of the target site to be edited (with the exception that it includes the desired edit). Through DNA repair and/or replication machinery, the endogenous strand of the target site is replaced by the newly synthesized replacement strand containing the desired edit. In some cases, prime editing may be thought of as a “search-and-replace” genome editing technology since the prime editors, as described herein, not only search and locate the desired target site to be edited, but at the same time, encode a replacement strand containing a desired edit, which is installed in place of the corresponding target site endogenous DNA strand.

[0015] The multi-flap prime editors of the present disclosure relate, in part, to the discovery that the mechanism of target-primed reverse transcription (TPRT) or “prime editing” can be leveraged or adapted for conducting precision CRISPR/Cas-based genome editing with high efficiency and genetic flexibility (e.g., as depicted in various embodiments of FIGS. 1A-1F). TPRT is naturally used by mobile DNA elements, such as mammalian non-LTR retrotransposons and bacterial Group II introns^{28,29}. The inventors have herein used Cas protein-reverse transcriptase fusions or related systems to target a specific DNA sequence with a guide RNA, generate a single strand nick at the target site, and use the nicked DNA as a primer for reverse transcription of an engineered reverse transcriptase template that is integrated with the guide RNA. However, while the concept begins with prime editors that use reverse transcriptases as the DNA polymerase component, the multi-flap prime editors described herein are not limited to reverse transcriptases but may include the use of virtually any DNA polymerase. Indeed, while the application throughout may refer to multi-flap prime editors with “reverse transcriptases,” it is set forth here that reverse transcriptases are only one type of DNA polymerase that may work with multi-flap prime editing. Thus, whereever the specification mentions “reverse transcriptases,” the person having ordinary skill in the art should appreciate that any suitable DNA polymerase may be used in place of the reverse transcriptase. Thus, in one aspect, the multi-flap prime editors may comprise Cas9 (or an equivalent napDNAbp) which is programmed to target a DNA sequence by associating it with a specialized guide RNA (i.e., PEgRNA) containing a spacer sequence that anneals to a complement of a protospacer sequence in the target DNA. The specialized guide RNA also contains new genetic information in the form of an extension that encodes a replacement strand of DNA containing a desired genetic alteration which is used to replace a corresponding endogenous DNA strand at the target site. To transfer information from the PEgRNA to the target DNA, the mechanism of multi-flap prime editing involves nicking the target site in one strand of the DNA to expose a 3′-hydroxyl group. The exposed 3′-hydroxyl group can then be used to prime the DNA polymerization of the edit-encoding extension on PEgRNA directly into the target site. In various embodiments, the extension—which provides the template for polymerization of the replacement strand containing the edit—can be formed from RNA or DNA. In the case of an RNA extension, the polymerase of the prime editor can be an RNA-dependent DNA polymerase (such as, a reverse transcriptase). In the case of a DNA extension, the polymerase of the prime editor may be a DNA-dependent DNA polymerase.

[0016] In classical prime editing, the newly synthesized strand (i.e., the replacement DNA strand containing the desired edit) that is formed by the herein disclosed prime editors would be homologous to the genomic target sequence (i.e., have the same sequence as) except for the inclusion of a desired nucleotide change (e.g., a single nucleotide change, a deletion, or an insertion, or a combination thereof). The newly synthesized (or replacement) strand of DNA may also be referred to as a single strand DNA flap, which would compete for hybridization with the complementary homologous endogenous DNA strand, thereby displacing the corresponding endogenous strand. In certain embodiments, the system can be combined with the use of an error-prone reverse transcriptase enzyme (e.g., provided as a fusion protein with the Cas9 domain, or provided in trans to the Cas9 domain). The error-prone reverse transcriptase enzyme can introduce alterations during synthesis of the single strand DNA flap. Thus, in certain embodiments, error-prone reverse transcriptase can be utilized to introduce nucleotide changes to the target DNA. Depending on the error-prone reverse transcriptase that is used with the system, the changes can be random or non-random.

[0017] In classical prime editing, resolution of the hybridized intermediate (comprising the single strand DNA flap synthesized by the reverse transcriptase hybridized to the endogenous DNA strand) can include removal of the resulting displaced flap of endogenous DNA (e.g., with a 5′ end DNA flap endonuclease, FEN1), ligation of the synthesized single strand DNA flap to the target DNA, and assimilation of the desired nucleotide change as a result of cellular DNA repair and/or replication processes. Because templated DNA synthesis offers single nucleotide precision for the modification of any nucleotide, including insertions and deletions, the scope of this approach is very broad and could foreseeably be used for myriad applications in basic science and therapeutics.

[0018] In some aspects, the specification provides a pair of prime editors, each comprising a nucleic acid programmable DNA binding protein (napDNAbp) and a DNA polymerase. In some embodiments, each prime editor is capable of carrying out genome editing by target-primed reverse transcription in the presence of an extended guide RNA.

[0019] In some aspects, the specification provides a pair of prime editors, each comprising a nucleic acid programmable DNA binding protein (napDNAbp) and a DNA polymerase, wherein the DNA polymerase is provided in trans with the napDNAbp. In various embodiments, each prime editor is capable of carrying out genome editing by target-primed reverse transcription in the presence of an extended guide RNA.

[0020] In some aspects, the specification provides a pair of prime editors, each comprising a nucleic acid programmable DNA binding protein (napDNAbp) and a reverse transcriptase. In various embodiments, each prime editor is capable of carrying out genome editing by target-primed reverse transcription in the presence of an extended guide RNA.

[0021] In some aspects, the specification provides a pair of prime editors, each comprising a nucleic acid programmable DNA binding protein (napDNAbp) and a reverse transcriptase, wherein the reverse transcriptase is provided in trans with the napDNAbp. In various embodiments, each prime editor is capable of carrying out genome editing by target-primed reverse transcription in the presence of an extended guide RNA.

[0022] In certain embodiments, the napDNAbp has a nickase activity. The napDNAbp may also be a Cas9 protein or functional equivalent thereof, such as a nuclease active Cas9, a nuclease inactive Cas9 (dCas9), or a Cas9 nickase (nCas9).

[0023] In certain embodiments, the napDNAbp is selected from the group consisting of: Cas9, Cas12e, Cas12d, Cas12a, Cas12b1, Cas13a, Cas12c, and Argonaute and optionally has a nickase activity.

[0024] In other embodiments, each prime editor of the dual prime editors, when complexed with an extended guide RNA, is capable of binding to a target DNA sequence.

[0025] In still other embodiments, the target DNA sequence comprises a target strand and a complementary non-target strand.

[0026] In other embodiments, the binding of the prime editor complexed to the extended guide RNA forms an R-loop. The R-loop can comprise (i) an RNA-DNA hybrid comprising the extended guide RNA and the target strand, and (ii) the complementary non-target strand.

[0027] In still other embodiments, the complementary non-target strand is nicked to form a reverse transcriptase priming sequence having a free 3′ end.

[0028] In various embodiments, the extended guide RNA comprises (a) a guide RNA and (b) an RNA extension at the 5′ or the 3′ end of the guide RNA, or at an intramolecular location in the guide RNA. The RNA extension can comprise (i) a reverse transcription template sequence comprising a desired nucleotide change, (ii) a reverse transcription primer binding site, and (iii) optionally, a linker sequence. In various embodiments, the reverse transcription template sequence may encode a single-strand DNA flap that is complementary to an endogenous DNA sequence adjacent to the nick site, wherein the single-strand DNA flap comprises the desired nucleotide change.

[0029] In various embodiments, the RNA extension is at least 5 nucleotides, at least 6 nucleotides, at least 7 nucleotides, at least 8 nucleotides, at least 9 nucleotides, at least 10 nucleotides, at least 11 nucleotides, at least 12 nucleotides, at least 13 nucleotides, at least 14 nucleotides, at least 15 nucleotides, at least 16 nucleotides, at least 17 nucleotides, at least 18 nucleotides, at least 19 nucleotides, at least 20 nucleotides, at least 21 nucleotides, at least 22 nucleotides, at least 23 nucleotides, at least 24 nucleotides, or at least 25 nucleotides in length.

[0030] In still other embodiments, the single-strand DNA flap may hybridize to the endogenous DNA sequence adjacent to the nick site, thereby installing the desired nucleotide change. In still other embodiments, the single-stranded DNA flap displaces the endogenous DNA sequence adjacent to the nick site and which has a free 5′ end. In certain embodiments, the displaced endogenous DNA having the 5′ end is excised by the cell.

[0031] In various embodiments, the cellular repair of the single-strand DNA flap results in installation of the desired nucleotide change, thereby forming a desired product.

[0032] In various other embodiments, the desired nucleotide change is installed in an editing window that is between about −4 to +10 of the PAM sequence.

[0033] In still other embodiments, the desired nucleotide change is installed in an editing window that is between about −5 to +5 of the nick site, or between about −10 to +10 of the nick site, or between about −20 to +20 of the nick site, or between about −30 to +30 of the nick site, or between about −40 to +40 of the nick site, or between about −50 to +50 of the nick site, or between about −60 to +60 of the nick site, or between about −70 to +70 of the nick site, or between about −80 to +80 of the nick site, or between about −90 to +90 of the nick site, or between about −100 to +100 of the nick site, or between about −200 to +200 of the nick site.

[0034] In various embodiments, the napDNAbp of the dual prime editors each comprise an amino acid sequence of SEQ ID NO: 18. In various other embodiments, the napDNAbp comprises an amino acid sequence that is at least 80%, 85%, 90%, 95%, 98%, or 99% identical to the amino acid sequence of any one of SEQ ID NOs: 26-39, 42-61, 75-76, 126, 130, 137, 141, 147, 153, 157, 445, 460, 467, and 482-487 (Cas9); SEQ ID NO: 77-86 (CP-Cas9); SEQ ID NO: 18-25 and 87-88 (SpCas9); and SEQ ID NOs: 62-72(Cas12)

[0035] In other embodiments, the reverse transcriptase of the disclosed prime editors and/or compositions of the dual prime editors may comprise any one of the amino acid sequences of SEQ ID NOs: 89-100, 105-122, 128-129, 132, 139, 143, 149, 154, 159, 235, 454, 471, 516, 662, 700-716, 739-742, and 766. In still other embodiments, the reverse transcriptase may comprise an amino acid sequence that is at least 80%, 85%, 90%, 95%, 98%, or 99% identical to the amino acid sequence of any one of SEQ ID NOs: 89-100, 105-122, 128-129, 132, 139, 143, 149, 154, 159, 235, 454, 471, 516, 662, 700-716, 739-742, and 766. These sequences may be naturally occurring reverse transcriptase sequences, e.g., from a retrovirus or a retrotransposon, of the sequences may be recombinant.

[0036] In various other embodiments, the prime editors of the dual prime editors herein disclosed may comprise various structural configurations. For example, in embodiments in which the prime editors are provided as a fusion protein, each of the dual prime editor fusion proteins may comprise the structure NH₂-[napDNAbp]-[reverse transcriptase]-COOH; or NH₂-[reverse transcriptase]-[napDNAbp]-COOH, wherein each instance of “]-[” indicates the presence of an optional linker sequence.

[0037] In various embodiments, the linker sequence comprises an amino acid sequence of SEQ ID NOs: 127, 165-176, 446, 453, and 767-769, or an amino acid sequence that this at least 80%, 85%, or 90%, or 95%, or 99% identical to any one of the linker amino acid sequence of SEQ ID NOs: 127, 165-176, 446, 453, and 767-769.

[0038] In various embodiments, the desired nucleotide change that is incorporated into the target DNA can be a single nucleotide change (e.g., a transition or transversion), an insertion of one or more nucleotides, or a deletion of one or more nucleotides.

[0039] In certain cases, the insertion is at least 1, at least 2, at least 3, at least 4, at least 5, at least 6, at least 7, at least 8, at least 9, at least 10, at least 11, at least 12, at least 13, at least 14, at least 15, at least 16, at least 17, at least 18, at least 19, at least 20, at least 30, at least 40, at least 50, at least 60, at least 70, at least 80, at least 90, at least 100, at least 200, at least 300, at least 400, or at least 500 nucleotides in length.

[0040] In certain other cases, the deletion is at least 1, at least 2, at least 3, at least 4, at least 5, at least 6, at least 7, at least 8, at least 9, at least 10, at least 11, at least 12, at least 13, at least 14, at least 15, at least 16, at least 17, at least 18, at least 19, at least 20, at least 30, at least 40, at least 50, at least 60, at least 70, at least 80, at least 90, at least 100, at least 200, at least 300, at least 400, or at least 500 nucleotides in length.

[0041] In another aspect, the present disclosure provides an extended guide RNA comprising a guide RNA and at least one RNA extension. The RNA extension can be positioned at the 3′ end of the guide RNA. In other embodiments, the RNA extension can be positioned at the 5′ of the guide RNA. In still other embodiments, the RNA extension can be positioned at an intramolecular position within the guide RNA, however, preferable, the intramolecular positioning of the extended portion does not disrupt the functioning of the protospacer.

[0042] In various embodiments, the extended guide RNA is capable of binding to a napDNAbp and directing the napDNAbp to a target DNA sequence. The target DNA sequence can comprise a target strand and a complementary non-target strand, wherein the guide RNA hybridizes to the target strand to form an RNA-DNA hybrid and an R-loop.

[0043] In various embodiments of the extended guide RNA, the at least one RNA extension can comprise a reverse transcription template sequence. In various other embodiment, the RNA extension may further comprises a reverse transcription primer binding site. In still further embodiments, the RNA extension may comprise a linker or spacer sequence that joins the RNA extension to the guide RNA.

[0044] In various embodiments, the RNA extension can be at least 5 nucleotides, at least 6 nucleotides, at least 7 nucleotides, at least 8 nucleotides, at least 9 nucleotides, at least 10 nucleotides, at least 11 nucleotides, at least 12 nucleotides, at least 13 nucleotides, at least 14 nucleotides, at least 15 nucleotides, at least 16 nucleotides, at least 17 nucleotides, at least 18 nucleotides, at least 19 nucleotides, at least 20 nucleotides, at least 21 nucleotides, at least 22 nucleotides, at least 23 nucleotides, at least 24 nucleotides, at least 25 nucleotides, at least 30 nucleotides, at least 40 nucleotides, at least 50 nucleotides, at least 60 nucleotides, at least 70 nucleotides, at least 80 nucleotides, at least 90 nucleotides, at least 100 nucleotides, at least 150 nucleotides, at least 200 nucleotides, at least 300 nucleotides, at least 400 nucleotides, or at least 500 nucleotides in length.

[0045] In other embodiments, the reverse transcription template sequence is at least 3 nucleotides, at least 4 nucleotides, at least 5 nucleotides, at least 6 nucleotides, at least 7 nucleotides, at least 8 nucleotides, at least 9 nucleotides, at least 10 nucleotides, at least 11 nucleotides, at least 12 nucleotides, at least 13 nucleotides, at least 14 nucleotides, at least 15 nucleotides, at least 16 nucleotides, at least 17 nucleotides, at least 18 nucleotides, at least 19 nucleotides, at least 20 nucleotides, at least 30 nucleotides, at least 40 nucleotides, at least 50 nucleotides, at least 60 nucleotides, at least 70 nucleotides, at least 80 nucleotides, at least 90 nucleotides, at least 100 nucleotides, at least 200 nucleotides, at least 300 nucleotides, at least 400 nucleotides, or at least 500 nucleotides in length.

[0046] In still other embodiments, wherein the reverse transcription primer binding site sequence is at least 3 nucleotides, at least 4 nucleotides, at least 5 nucleotides, at least 6 nucleotides, at least 7 nucleotides, at least 8 nucleotides, at least 9 nucleotides, at least 10 nucleotides, at least 11 nucleotides, at least 12 nucleotides, at least 13 nucleotides, at least 14 nucleotides, at least 15 nucleotides, at least 16 nucleotides, at least 17 nucleotides, at least 18 nucleotides, at least 19 nucleotides, at least 20 nucleotides, at least 30 nucleotides, at least 40 nucleotides, at least 50 nucleotides, at least 60 nucleotides, at least 70 nucleotides, at least 80 nucleotides, at least 90 nucleotides, at least 100 nucleotides, at least 200 nucleotides, at least 300 nucleotides, at least 400 nucleotides, or at least 500 nucleotides in length.

[0047] In other embodiments, the optional linker or spacer sequence is at least 3 nucleotides, at least 4 nucleotides, at least 5 nucleotides, at least 6 nucleotides, at least 7 nucleotides, at least 8 nucleotides, at least 9 nucleotides, at least 10 nucleotides, at least 11 nucleotides, at least 12 nucleotides, at least 13 nucleotides, at least 14 nucleotides, at least 15 nucleotides, at least 16 nucleotides, at least 17 nucleotides, at least 18 nucleotides, at least 19 nucleotides, at least 20 nucleotides, at least 30 nucleotides, at least 40 nucleotides, at least 50 nucleotides, at least 60 nucleotides, at least 70 nucleotides, at least 80 nucleotides, at least 90 nucleotides, at least 100 nucleotides, at least 200 nucleotides, at least 300 nucleotides, at least 400 nucleotides, or at least 500 nucleotides in length.

[0048] In various embodiments of the extended guide RNAs, the reverse transcription template sequence may encode a single-strand DNA flap that is complementary to an endogenous DNA sequence adjacent to a nick site, wherein the single-strand DNA flap comprises a desired nucleotide change. The single-stranded DNA flap may displace an endogenous single-strand DNA at the nick site. The displaced endogenous single-strand DNA at the nick site can have a 5′ end and form an endogenous flap, which can be excised by the cell. In various embodiments, excision of the 5′ end endogenous flap can help drive product formation since removing the 5′ end endogenous flap encourages hybridization of the single-strand 3′ DNA flap to the corresponding complementary DNA strand, and the incorporation or assimilation of the desired nucleotide change carried by the single-strand 3′ DNA flap into the target DNA.

[0049] In various embodiments of the extended guide RNAs, the cellular repair of the single-strand DNA flap results in installation of the desired nucleotide change, thereby forming a desired product.

[0050] In certain embodiments, the PEgRNA comprises the nucleotide sequence of SEQ ID NOs: 101-104, 181-183, 223-234, 237-244, 277, 324-330, 332, 334, 336, 338, 340, 342, 344, 346, 348, 350, 352, 354, 356, 358, 360, 362, 364, 366, 368, 394, 429-442, 499-505, 641-649, 678-692, 735-736, 757-761, 776-777, 2997-3103, 3113-3121, 3305-3455, 3479-3493, 3522-3540, 3549-3556, 3628-3698, 3755-3810, 3874, 3890-3901, 3905-3911, 3913-3929, and 3972-3989 or a nucleotide sequence having at least 85%, or at least 90%, or at least 95%, or at least 98%, or at least 99% sequence identity with any one of SEQ ID NOs: 101-104, 181-183, 223-234, 237-244, 277, 324-330, 332, 334, 336, 338, 340, 342, 344, 346, 348, 350, 352, 354, 356, 358, 360, 362, 364, 366, 368, 394, 429-442, 499-505, 641-649, 678-692, 735-736, 757-761, 776-777, 2997-3103, 3113-3121, 3305-3455, 3479-3493, 3522-3540, 3549-3556, 3628-3698, 3755-3810, 3874, 3890-3901, 3905-3911, 3913-3929, and 3972-3989.

[0051] In yet another aspect of the invention, the specification provides for complexes comprising a prime editor described herein and any extended guide RNA described above.

[0052] In still other aspects of the invention, the specification provides a complex comprising a napDNAbp and an extended guide RNA. The napDNAbp can be a Cas9 nickase, or can be an amino acid sequence of SEQ ID NOs: 42-57 (Cas9 nickase) and 65 (AsCas12a nickase), or an amino acid sequence that is at least 80%, 85%, 90%, 95%, 98%, or 99% identical to the amino acid sequence of any one of SEQ ID NOs: 42-57 (Cas9 nickase) and 65 (AsCas12a nickase).

[0053] In various embodiments involving a complex, the extended guide RNA is capable of directing the napDNAbp to a target DNA sequence. In various embodiments, a reverse transcriptase may be provided in trans, i.e., provided from a different source than the complex itself. For example, a reverse transcriptase could be provided to the same cell having the complex by introducing a separate vector separately encoding the reverse transcriptase.

[0054] In another aspect, the disclosure provides a system comprising a first and a second prime editor complex, each complex comprising a prime editor and a prime editing guide RNA (PEgRNA). In some embodiments, each prime editor comprises a nucleic acid programmable DNA binding protein (napDNAbp) and a polypeptide having an RNA-dependent DNA polymerase activity, and each PEgRNA comprises a spacer sequence, a gRNA core, a DNA synthesis template, and a primer binding site. In certain embodiments, each DNA synthesis template encodes a single-stranded DNA sequence comprising an edited portion. Two single-stranded DNA sequences encoded may by complementary to one another and form a duplex that integrates into the target site to be edited. In some embodiments, the two single-stranded DNA sequences encoded may comprise a region of complementarity to one another. In certain embodiments, the two single-stranded DNA sequences encoded may comprise a region of complementarity to one another that is at least 2 bp, at least 3 bp, at least 4 bp, at least 5 bp, at least 10 bp, at least 20 bp, at least 30 bp, at least 40 bp, at least 50 bp, at least 100 bp, at least 200 bp, at least 300 bp, at least 400 bp, at least 500 bp, at least 600 bp, at least 700 bp, at least 800 bp, at least 900 bp, or at least 1000 bp long. In some embodiments, the prime editor is provided as a fusion protein. In certain embodiments, the components of the prime editor (i.e., the napDNAbp and the polypeptide having an RNA-dependent DNA polymerase activity) are provided in trans.

[0055] In another aspect, the disclosure provides a system comprising a first, a second, a third, and a fourth prime editor complex, each complex comprising a prime editor and a prime editing guide RNA (PEgRNA). In some embodiments, each prime editor comprises a nucleic acid programmable DNA binding protein (napDNAbp) and a polypeptide having an RNA-dependent DNA polymerase activity, and each PEgRNA comprises a spacer sequence, a gRNA core, a DNA synthesis template, and a primer binding site. In certain embodiments, each DNA synthesis template encodes a single-stranded DNA sequence comprising an edited portion. Two single-stranded DNA sequences encoded may by complementary to one another and form a duplex that integrates into the target site to be edited. In some embodiments, the two single-stranded DNA sequences encoded may comprise a region of complementarity to one another. In certain embodiments, the two single-stranded DNA sequences encoded may comprise a region of complementarity to one another that is at least 2 bp, at least 3 bp, at least 4 bp, at least 5 bp, at least 10 bp, at least 20 bp, at least 30 bp, at least 40 bp, at least 50 bp, at least 100 bp, at least 200 bp, at least 300 bp, at least 400 bp, at least 500 bp, at least 600 bp, at least 700 bp, at least 800 bp, at least 900 bp, or at least 1000 bp long. In some embodiments, the prime editor is provided as a fusion protein. In certain embodiments, the components of the prime editor (i.e., the napDNAbp and the polypeptide having an RNA-dependent DNA polymerase activity) are provided in trans.

[0056] In some embodiments, each napDNAbp is a Cas9 domain or variant thereof. In some embodiments, each napDNAbp is a nuclease active Cas9 domain, a nuclease inactive Cas9 domain, or a Cas9 nickase domain or a variant thereof. In certain embodiments, each napDNAbp is independently selected from the group consisting of: Cas9, Cas12e, Cas12d, Cas12a, Cas12b1, Cas13a, Cas12c, and Argonaute and optionally has a nickase activity. In various embodiments, each napDNAbp comprises an amino acid sequence of any one of SEQ ID NOs: 2-65, or an amino acid sequence at least 80%, 85%, 90%, 95%, or 99% identical to any one of SEQ ID NOs: 2-65.

[0057] In some embodiments, the polypeptide comprising an RNA-dependent DNA polymerase activity is a reverse transcriptase. In certain embodiments, the polypeptide comprising an RNA-dependent DNA polymerase activity comprises an amino acid sequence of any one of SEQ ID NOs: 37, 68-79, 82-98, 81, 98, and 110 or an amino acid sequence having at least an 80%, 85%, 90%, 95%, or 99% sequence identity with any one of SEQ ID NOs: 37, 68-79, 82-98, 81, 98, and 110.

[0058] In some embodiments, each prime editor may comprise a linker that joins the napDNAbp and the reverse transcriptase. In certain embodiments, the linker comprises an amino acid sequence of any one of SEQ ID NOs: 119-128, or an amino acid sequence having at least an 80%, 85%, 90%, 95%, or 99% sequence identity with any one of SEQ ID NOs: 119-128. Each linker may be 1, 2, 3, 4, 5, 6, 7, 8, 9, 10, 11, 12, 13, 14, 15, 16, 17, 18, 19, 20, 21, 22, 23, 24, 25, 26, 27, 28, 29, 30, 31, 32, 33, 34, 35, 36, 38, 38, 39, 40, 41, 42, 43, 44, 45, 46, 47, 48, 49, or 50 amino acids in length.

[0059] In some embodiments, each PEgRNA may independently comprise a nucleotide sequence of any one of SEQ ID NOs: 192-203, or a nucleotide sequence having at least an 80%, 85%, 90%, 95%, or 99% sequence identity with any one of SEQ ID NOs: 192-203.

[0060] In various embodiments, each spacer sequence of each PEgRNA may bind to a specific binding site of the double-stranded DNA sequence adjacent the target site to be edited. In some embodiments, the binding of a spacer sequence of one prime editor complex to one strand of the double-stranded DNA sequence and the binding of a spacer sequence of another prime editor complex to the opposite strand of the double-stranded DNA sequence results in the nicking of both DNA strands at a nick site proximal to the PAM sequences on each strand.

[0061] In another aspect, the present disclosure provides polynucleotides. In some embodiments, the polynucleotides may encode any of the complexes described herein. In certain embodiments, the polynucleotides may encode any of the PEgRNAs described herein.

[0062] In yet another aspect, the specification provides polynucleotides. In certain embodiments, the polynucleotides may encode any of the prime editors disclosed herein. In certain other embodiments, the polynucleotides may encode any of the napDNAbps disclosed herein. In still further embodiments, the polynucleotides may encode any of the reverse transcriptases disclosed herein. In yet other embodiments, the polynucleotides may encode any of the extended guide RNAs disclosed herein, any of the reverse transcription template sequences, or any of the reverse transcription primer sites, or any of the optional linker sequences.

[0063] In still other aspects, the specification provides vectors comprising the polynucleotides described herein. Thus, in certain embodiments, the vectors comprise polynucleotides for encoding the prime editors comprising a napDNAbp and a reverse transcriptase (i.e., as fusion protein, or expressed in trans). In certain embodiments, the vectors comprise polynucleotides for encoding any of the complexes described herein. In other embodiments, the vectors comprise polynucleotides that separately encode a napDNAbp and reverse transcriptase. In still other embodiments, the vectors may comprise polynucleotides that encode the extended guide RNAs. In various embodiments, the vectors may comprise one or more polynucleotides that encode napDNAbps, reverse transcriptase, and extended guide RNAs on the same or separate vectors. In some embodiments, the vectors comprise polynucleotides for encoding any of the pegRNAs described herein.

[0064] In still other aspects, the specification provides cells comprising a prime editor as described herein and an extended guide RNA. The cells may be transformed with the vectors comprising the prime editors, napDNAbps, reverse transcriptase, and extended guide RNAs. These genetic elements may be comprised on the same vector or on different vectors. In some embodiments, the cells comprise any of the systems or complexes described herein. The cells may be transformed with polynucleotides encoding the any of the systems, complexes, and/or pegRNAs disclosed herein, or vectors comprising polynucleotides encoding the any of the systems, complexes, or pegRNAs disclosed herein.

[0065] In yet another aspect, the specification provides pharmaceutical compositions. In certain embodiments, the pharmaceutical compositions comprise one or more of a napDNAbp, a prime editor, a reverse transcriptase, and an extended guide RNA. In certain embodiments, the pharmaceutical compositions comprise any of the systems and/or complexes described herein. In certain embodiments, the pharmaceutical comporisitions comprise any of the prime editors, systems, or complexes described herein and a pharmaceutically acceptable excipient. In other embodiments, the pharmaceutical compositions comprise any extend guide RNA described herein and a pharmaceutically acceptable excipient. In still other embodiments, the pharmaceutical compositions comprise any extend guide RNA described herein in combination with any prime editor described herein and a pharmaceutically acceptable excipient. In yet other embodiments, the pharmaceutical compositions comprise any polynucleotide sequence encoding one or more of a napDNAbp, a prime editor, a reverse transcriptase, and an extended guide RNA, or any of the vectors disclosed herein. In still other embodiments, the various components disclosed herein may be separated into one or more pharmaceutical compositions. For example, a first pharmaceutical composition may comprise a prime editor or a napDNAbp, a second pharmaceutical compositions may comprise a reverse transcriptase, and a third pharmaceutical composition may comprise an extended guide RNA.

[0066] In still a further aspect, the present disclosure provides kits. In one embodiment, the kit comprises one or more polynucleotides encoding one or more components, including a prime editor, a napDNAbp, a reverse transcriptase, and an extended guide RNA. The kits may also comprise vectors, cells, and isolated preparations of polypeptides, including any prime editor, napDNAbp, or reverse transcriptase disclosed herein.

[0067] In yet another aspect, the present disclosure provides for methods of using the disclosed compositions of matter, including methods of using any of the systems described herein for simultaneously editing both complementary strands of a double-stranded DNA sequence at a target site.

[0068] In some embodiments, the method comprises contacting the double-stranded DNA sequence with any of the system disclosed herein.

[0069] In one aspect, the disclosure provides methods comprising contacting a double-stranded DNA sequence at a target site with a first and a second prime editor complex, each complex comprising a prime editor and a prime editing guide RNA (PEgRNA). In some embodiments, each prime editor comprises a nucleic acid programmable DNA binding protein (napDNAbp) and a polypeptide having an RNA-dependent DNA polymerase activity, and each PEgRNA comprises a spacer sequence, a gRNA core, a DNA synthesis template, and a primer binding site. In some embodiments, each prime editor is provided as a fusion protein. In some embodiments, the components of the prime editor are provided in trans. In certain embodiments, each DNA synthesis template encodes a single-stranded DNA sequence comprising an edited portion. Two single-stranded DNA sequences encoded may be complementary to one another and form a duplex that integrates into the target site to be edited. The various elements of the prime editor complexes may comprise any of the embodiments of the systems disclosed herein.

[0070] In another aspect, the disclosure provides methods comprising contacting a double-stranded DNA sequence at a target site with a first, a second, a third, and a fourth prime editor complex, each complex comprising a prime editor and a prime editing guide RNA (PEgRNA). In some embodiments, each prime editor comprises a nucleic acid programmable DNA binding protein (napDNAbp) and a polypeptide having an RNA-dependent DNA polymerase activity, and each PEgRNA comprises a spacer sequence, a gRNA core, a DNA synthesis template, and a primer binding site. In some embodiments, each prime editor is provided as a fusion protein. In some embodiments, the components of the prime editor are provided in trans. In certain embodiments, each DNA synthesis template encodes a single-stranded DNA sequence. Two single-stranded DNA sequences encoded may be complementary to one another and form a duplex that integrates into the target site to be edited. The various elements of the prime editor complexes may comprise any of the embodiments of the systems disclosed herein.

[0071] In some embodiments, the methods provided herein allow for inversion of a target DNA sequence. In some embodiments, the first single-stranded DNA sequence encoded by the first DNA synthesis template and the second single-stranded DNA sequence encoded by the second DNA synthesis template are on opposite ends of a target DNA sequence, and the third single-stranded DNA sequence encoded by the third DNA synthesis template and the fourth single-stranded DNA sequence encoded by the fourth DNA synthesis template are on opposite ends of the same target DNA sequence.

[0072] In some embodiments, the methods provided herein further comprise providing a circular DNA donor. In certain embodiments, the first single-stranded DNA sequence encoded by the first DNA synthesis template and the third single-stranded DNA sequence encoded by the third DNA synthesis template are on opposite ends of the target DNA sequence, and the second single-stranded DNA sequence encoded by the second DNA synthesis template and the fourth single-stranded DNA sequence encoded by the fourth DNA synthesis template are on the circular DNA donor. In some embodiments, the portion of the circular DNA donor between the second single-stranded DNA sequence and the fourth single-stranded DNA sequence replaces the target DNA sequence between the first single-stranded DNA sequence and the third single-stranded DNA sequence.

[0073] In some embodiments, the methods provided herein allow for translocation of a target DNA sequence from a first nucleic acid molecule (e.g., a first chromosome) to a second nucleic acid molecule (e.g., a second chromosome). In some embodiments, the first single-stranded DNA sequence encoded by the first DNA synthesis template and the third single-stranded DNA sequence encoded by the third single-stranded DNA synthesis template are on a first nucleic acid molecule, and the second single-stranded DNA sequence encoded by the second DNA synthesis template and the fourth single-stranded DNA sequence encoded by the fourth DNA synthesis template are on a second nucleic acid molecule. In certain embodiments, a portion of the first nucleic acid molecule between the first single-stranded DNA sequence and the third single-stranded DNA sequence is incorporated into the second nucleic acid molecule. In certain embodiments, a portion of the second nucleic acid molecule between the second single-stranded DNA sequence and the fourth single-stranded DNA sequence is incorporated into the first nucleic acid molecule.

[0074] In another aspect, the present disclosure provides a pair of PEgRNAs for use in multi-flap prime editing. In some embodiments, the pair comprises a first PEgRNA and a second PEgRNA, and each PEgRNA independently comprises a spacer sequence, a gRNA core, a DNA synthesis template, and a primer binding site. In certain embodiments, each DNA synthesis template encodes a single-stranded DNA sequence. In various embodiments, the multi-flap prime editors are used in connection with a pair of PEgRNAs which target separate prime editors to either side of a target site, wherein the pair of PEgRNA each encode 3′ nucleic acid flaps which comprise nucleic acid sequences which are reverse complements of each other. In various embodiments, the 3′ flaps comprising the reverse complement sequences may anneal to one another to form a duplex comprising the desired edit or nucleic acid sequence encoding by the PEgRNAs. The duplex then becomes integrated into the target site by replacement of the corresponding endogenous duplex positioned between adjacent nick sites.

[0075] In another aspect, the present disclosure provides a plurality of PEgRNAs for use in multi-flap prime editing. In some embodiments, the plurality comprises a first, a second, a third, and a fourth PEgRNA. In some embodiments, each of the four PEgRNA independently comprises a spacer sequence, a gRNA core, a DNA synthesis template, and a primer binding site. In certain embodiments, each DNA synthesis template encodes a single-stranded DNA sequence. Two single-stranded DNA sequences encoded may be complementary to one another.

[0076] In various aspects, the present disclosure provides polynucleotides encoding any of the pairs or pluralities of PEgRNAs described herein. In certain aspects, the present disclosure provides vectors encoding a polynucleotide encoding any of the pairs or pluralities of PEgRNAs described herein. In yet another aspect, the present disclosure provides cells comprising a vector encoding a polynucleotide encoding any of the pairs or pluralities of PEgRNAs described herein. In other aspects, the disclosure provides pharmaceutical compositions comprising any of the pairs or pluralities of PEgRNAs described herein, a vector encoding any of the pairs or pluralities of PEgRNAs described herein, or a cell comprising a vector encoding any of the pairs or pluralities of PEgRNAs described herein. In certain embodiments, the pharmaceutical compositions comprise a pharmaceutical excipient.

[0077] In one embodiment, the methods relate to a method for installing a desired nucleotide change in a double-stranded DNA sequence. The method first comprises contacting the double-stranded DNA sequence with a complex comprising a prime editor and an extended guide RNA, wherein the prime editor comprises a napDNAbp and a reverse transcriptase and wherein the extended guide RNA comprises a reverse transcription template sequence comprising the desired nucleotide change. In some embodiments, each prime editor is provided as a fusion protein. In some embodiments, the components of the prime editor are provided in trans. Next, the method involves nicking the double-stranded DNA sequence on the non-target strand, thereby generating a free single-strand DNA having a 3′ end. The method then involves hybridizing the 3′ end of the free single-strand DNA to the reverse transcription template sequence, thereby priming the reverse transcriptase domain The method then involves polymerizing a strand of DNA from the 3′ end, thereby generating a single-strand DNA flap comprising the desired nucleotide change. Then, the method involves replacing an endogenous DNA strand adjacent the cut site with the single-strand DNA flap, thereby installing the desired nucleotide change in the double-stranded DNA sequence.

[0078] In other embodiments, the disclosure provides for a method for introducing one or more changes in the nucleotide sequence of a DNA molecule at a target locus, comprising contacting the DNA molecule with a nucleic acid programmable DNA binding protein (napDNAbp) and a guide RNA which targets the napDNAbp to the target locus, wherein the guide RNA comprises a reverse transcriptase (RT) template sequence comprising at least one desired nucleotide change. Next, the method involves forming an exposed 3′ end in a DNA strand at the target locus and then hybridizing the exposed 3′ end to the RT template sequence to prime reverse transcription. Next, a single strand DNA flap comprising the at least one desired nucleotide change based on the RT template sequence is synthesized or polymerized by reverse transcriptase. Lastly, the at least one desired nucleotide change is incorporated into the corresponding endogenous DNA, thereby introducing one or more changes in the nucleotide sequence of the DNA molecule at the target locus.

[0079] In still other embodiments, the disclosure provides a method for introducing one or more changes in the nucleotide sequence of a DNA molecule at a target locus by target-primed reverse transcription, the method comprising: (a) contacting the DNA molecule at the target locus with a (i) prime editor comprising a nucleic acid programmable DNA binding protein (napDNAbp) and a reverse transcriptase and (ii) a guide RNA comprising an RT template comprising a desired nucleotide change; (b) conducting target-primed reverse transcription of the RT template to generate a single strand DNA comprising the desired nucleotide change; and (c) incorporating the desired nucleotide change into the DNA molecule at the target locus through a DNA repair and/or replication process.

[0080] In certain embodiments, the step of replacing the endogenous DNA strand comprises: (i) hybridizing the single-strand DNA flap to the endogenous DNA strand adjacent the cut site to create a sequence mismatch; (ii) excising the endogenous DNA strand; and (iii) repairing the mismatch to form the desired product comprising the desired nucleotide change in both strands of DNA.

[0081] In various embodiments, the desired nucleotide change can be a single nucleotide substitution (e.g., and transition or a transversion change), a deletion, or an insertion. For example, the desired nucleotide change can be (1) a G to T substitution, (2) a G to A substitution, (3) a G to C substitution, (4) a T to G substitution, (5) a T to A substitution, (6) a T to C substitution, (7) a C to G substitution, (8) a C to T substitution, (9) a C to A substitution, (10) an A to T substitution, (11) an A to G substitution, or (12) an A to C substitution.

[0082] In other embodiments, the desired nucleoid change can convert (1) a G:C basepair to a T:A basepair, (2) a G:C basepair to an A:T basepair, (3) a G:C basepair to C:G basepair, (4) a T:A basepair to a G:C basepair, (5) a T:A basepair to an A:T basepair, (6) a T:A basepair to a C:G basepair, (7) a C:G basepair to a G:C basepair, (8) a C:G basepair to a T:A basepair, (9) a C:G basepair to an A:T basepair, (10) an A:T basepair to a T:A basepair, (11) an A:T basepair to a G:C basepair, or (12) an A:T basepair to a C:G basepair.

[0083] In still other embodiments, the method introduces a desired nucleotide change that is an insertion. In certain cases, the insertion is at least 1, at least 2, at least 3, at least 4, at least 5, at least 6, at least 7, at least 8, at least 9, at least 10, at least 11, at least 12, at least 13, at least 14, at least 15, at least 16, at least 17, at least 18, at least 19, at least 20, at least 30, at least 40, at least 50, at least 60, at least 70, at least 80, at least 90, at least 100, at least 200, at least 300, at least 400, or at least 500 nucleotides in length.

[0084] In other embodiments, the method introduces a desired nucleotide change that is a deletion. In certain other cases, the deletion is at least 1, at least 2, at least 3, at least 4, at least 5, at least 6, at least 7, at least 8, at least 9, at least 10, at least 11, at least 12, at least 13, at least 14, at least 15, at least 16, at least 17, at least 18, at least 19, at least 20, at least 30, at least 40, at least 50, at least 60, at least 70, at least 80, at least 90, at least 100, at least 200, at least 300, at least 400, or at least 500 nucleotides in length.

[0085] In various embodiments, the desired nucleotide change corrects a disease-associated gene. The disease-associated gene can be associated with a monogenetic disorder selected from the group consisting of: Adenosine Deaminase (ADA) Deficiency; Alpha-1 Antitrypsin Deficiency; Cystic Fibrosis; Duchenne Muscular Dystrophy; Galactosemia; Hemochromatosis; Huntington's Disease; Maple Syrup Urine Disease; Marfan Syndrome; Neurofibromatosis Type 1; Pachyonychia Congenita; Phenylkeotnuria; Severe Combined Immunodeficiency; Sickle Cell Disease; Smith-Lemli-Opitz Syndrome; and Tay-Sachs Disease. In other embodiments, the disease-associated gene can be associated with a polygenic disorder selected from the group consisting of: heart disease; high blood pressure; Alzheimer's disease; arthritis; diabetes; cancer; and obesity.

[0086] The methods disclosed herein may involve fusion proteins having a napDNAbp that is a nuclease dead Cas9 (dCas9), a Cas9 nickase (nCas9), or a nuclease active Cas9. In other embodiments, a napDNAbp and reverse transcriptase are not encoded as a single fusion protein, but rather can be provided in separate constructs. Thus, in some embodiments, the reverse transcriptase can be provided in trans relative to the napDNAbp (rather than by way of a fusion protein).

[0087] In various embodiments involving methods, the napDNAbp may comprise an amino acid sequence of SEQ ID NOs: 26-61, 75-76, 126, 130, 137, 141, 147, 153, 157, 445, 460, 467, and 482-487 (Cas9); (SpCas9); SEQ ID NO: 77-86 (CP-Cas9); SEQ ID NO: 18-25 and 87-88 (SpCas9); and SEQ ID NOs: 62-72(Cas12). The napDNAbp may also comprise an amino acid sequence that is at least 80%, 85%, 90%, 95%, 98%, or 99% identical to the amino acid sequence of any one of SEQ ID NOs: 26-61, 75-76, 126, 130, 137, 141, 147, 153, 157, 445, 460, 467, and 482-487 (Cas9); (SpCas9); SEQ ID NO: 77-86 (CP-Cas9); SEQ ID NO: 18-25 and 87-88 (SpCas9); and SEQ ID NOs: 62-72(Cas12).

[0088] In various embodiments involving methods, the reverse transcriptase may comprise any one of the amino acid sequences of SEQ ID NOs: 89-100, 105-122, 128-129, 132, 139, 143, 149, 154, 159, 235, 454, 471, 516, 662, 700-716, 739-742, and 766. The reverse transcriptase may also comprise an amino acid sequence that is at least 80%, 85%, 90%, 95%, 98%, or 99% identical to the amino acid sequence of any one of SEQ ID NOs: 89-100, 105-122, 128-129, 132, 139, 143, 149, 154, 159, 235, 454, 471, 516, 662, 700-716, 739-742, and 766.

[0089] The methods may involve the use of a PEgRNA comprising a nucleotide sequence of SEQ ID NOs: 101-104, 181-183, 223-234, 237-244, 277, 324-330, 332, 334, 336, 338, 340, 342, 344, 346, 348, 350, 352, 354, 356, 358, 360, 362, 364, 366, 368, 394, 429-442, 499-505, 641-649, 678-692, 735-736, 757-761, 776-777, 2997-3103, 3113-3121, 3305-3455, 3479-3493, 3522-3540, 3549-3556, 3628-3698, 3755-3810, 3874, 3890-3901, 3905-3911, 3913-3929, and 3972-3989, or a nucleotide sequence having at least 80%, or at least 85%, or at least 90%, or at least 95%, or at least 99% sequence identity theretoThe methods may comprise the use of extended guide RNAs that comprise an RNA extension at the 3′ end, wherein the RNA extension comprises the reverse transcription template sequence.

[0090] The methods may comprise the use of extended guide RNAs that comprise an RNA extension at the 5′ end, wherein the RNA extension comprises the reverse transcription template sequence.

[0091] The methods may comprise the use of extended guide RNAs that comprise an RNA extension at an intramolecular location in the guide RNA, wherein the RNA extension comprises the reverse transcription template sequence.

[0092] The methods may comprise the use of extended guide RNAs having one or more RNA extensions that are at least 1, at least 2, at least 3, at least 4, at least 5, at least 6, at least 7, at least 8, at least 9, at least 10, at least 11, at least 12, at least 13, at least 14, at least 15, at least 16, at least 17, at least 18, at least 19, at least 20, at least 30, at least 40, at least 50, at least 60, at least 70, at least 80, at least 90, at least 100, at least 200, at least 300, at least 400, or at least 500 nucleotides in length.

[0093] It should be appreciated that the foregoing concepts, and additional concepts discussed below, may be arranged in any suitable combination, as the present disclosure is not limited in this respect. Further, other advantages and novel features of the present disclosure will become apparent from the following detailed description of various non-limiting embodiments when considered in conjunction with the accompanying figures.

### BRIEF DESCRIPTION OF THE DRAWINGS

[0094] The following drawings form part of the present specification and are included to further demonstrate certain aspects of the present disclosure, which can be better understood by reference to one or more of these drawings in combination with the detailed description of specific embodiments presented herein.

[0095] FIG. 1A provides a schematic of an exemplary process for introducing a single nucleotide change, and/or insertion, and/or deletion into a DNA molecule (e.g., a genome) using a fusion protein comprising a reverse transcriptase fused to a Cas9 protein in complex with an extended guide RNA molecule. In this embodiment, the guide RNA is extended at the 3′ end to include a reverse transcriptase template sequence. The schematic shows how a reverse transcriptase (RT) fused to a Cas9 nickase, in a complex with a guide RNA (gRNA), binds the DNA target site and nicks the PAM-containing DNA strand adjacent to the target nucleotide. The RT enzyme uses the nicked DNA as a primer for DNA synthesis from the gRNA, which is used as a template for the synthesis of a new DNA strand that encodes the desired edit. The editing process shown may be referred to as target-primed reverse transcription editing (TRT editing) or equivalently, “prime editing.”

[0096] FIG. 1B provides the same representation as in FIG. 1A, except that the prime editor complex is represented more generally as [napDNAbp]-[P]:PEgRNA or [P]-[napDNAbp]:PEgRNA, wherein “P” refers to any polymerase (e.g., a reverse transcriptase), “napDNAbp” refers to a nucleic acid programmable DNA binding protein (e.g., SpCas9), and “PEgRNA” refers to a prime editing guide RNA, and “]-[” refers to an optional linker. As described elsewhere, e.g., FIGS. 3A-3G, the PEgRNA comprises an 5′ extension arm comprising a primer binding site and a DNA synthesis template. Although not shown, it is contemplated that the extension arm of the PEgRNA (i.e., which comprises a primer binding site and a DNA synthesis template) can be DNA or RNA. The particular polymerase contemplated in this configuration will depend upon the nature of the DNA synthesis template. For instance, if the DNA synthesis template is RNA, then the polymerase case be an RNA-dependent DNA polymerase (e.g., reverse transcriptase). If the DNA synthesis template is DNA, then the polymerase can be a DNA-dependent DNA polymerase.

[0097] FIG. 1C provides a schematic of an exemplary process for introducing a single nucleotide change, and/or insertion, and/or deletion into a DNA molecule (e.g., a genome) using a fusion protein comprising a reverse transcriptase fused to a Cas9 protein in complex with an extended guide RNA molecule. In this embodiment, the guide RNA is extended at the 5′ end to include a reverse transcriptase template sequence. The schematic shows how a reverse transcriptase (RT) fused to a Cas9 nickase, in a complex with a guide RNA (gRNA), binds the DNA target site and nicks the PAM-containing DNA strand adjacent to the target nucleotide. The RT enzyme uses the nicked DNA as a primer for DNA synthesis from the gRNA, which is used as a template for the synthesis of a new DNA strand that encodes the desired edit. The editing process shown may be referred to as target-primed reverse transcription editing (TRT editing) or equivalently, “prime editing.”

[0098] FIG. 1D provides the same representation as in FIG. 1C, except that the prime editor complex is represented more generally as [napDNAbp]-[P]:PEgRNA or [P]-[napDNAbp]:PEgRNA, wherein “P” refers to any polymerase (e.g., a reverse transcriptase), “napDNAbp” refers to a nucleic acid programmable DNA binding protein (e.g., SpCas9), and “PEgRNA” refers to a prime editing guide RNA, and “]-[” refers to an optional linker. As described elsewhere, e.g., FIGS. 3A-3G, the PEgRNA comprises an 3′ extension arm comprising a primer binding site and a DNA synthesis template. Although not shown, it is contemplated that the extension arm of the PEgRNA (i.e., which comprises a primer binding site and a DNA synthesis template) can be DNA or RNA. The particular polymerase contemplated in this configuration will depend upon the nature of the DNA synthesis template. For instance, if the DNA synthesis template is RNA, then the polymerase case be an RNA-dependent DNA polymerase (e.g., reverse transcriptase). If the DNA synthesis template is DNA, then the polymerase can be a DNA-dependent DNA polymerase. In various embodiments, the PEgRNA can be engineered or synthesized to incorporate a DNA-based DNA synthesis template.

[0099] FIG. 1E is a schematic depicting an exemplary process of how the synthesized single strand of DNA (which comprises the desired nucleotide change) becomes resolved such that the desired nucleotide change is incorporated into the DNA. As shown, following synthesis of the edited strand (or “mutagenic strand”), equilibration with the endogenous strand, flap cleavage of the endogenous strand, and ligation leads to incorporation of the DNA edit after resolution of the mismatched DNA duplex through the action of endogenous DNA repair and/or replication processes.

[0100] FIG. 1F is a schematic showing that “opposite strand nicking” can be incorporated into the resolution method of FIG. 1E to help drive the formation of the desired product versus the reversion product. In opposite strand nicking, a second Cas9/gRNA complex is used to introduce a second nick on the opposite strand from the initial nicked strand. This induces the endogenous cellular DNA repair and/or replication processes to preferentially replace the unedited strand (i.e., the strand containing the second nick site).

[0101] FIG. 1G provides another schematic of an exemplary process for introducing a single nucleotide change, and/or insertion, and/or deletion into a DNA molecule (e.g., a genome) of a target locus using a nucleic acid programmable DNA binding protein (napDNAbp) complexed with an extended guide RNA. This process may be referred to as an embodiment of prime editing. The extended guide RNA comprises an extension at the 3′ or 5′ end of the guide RNA, or at an intramolecular location in the guide RNA. In step (a), the napDNAbp/gRNA complex contacts the DNA molecule and the gRNA guides the napDNAbp to bind to the target locus. In step (b), a nick in one of the strands of DNA (the R-loop strand, or the PAM-containing strand, or the non-target DNA strand, or the protospacer strand) of the target locus is introduced (e.g., by a nuclease or chemical agent), thereby creating an available 3′ end in one of the strands of the target locus. In certain embodiments, the nick is created in the strand of DNA that corresponds to the R-loop strand, i.e., the strand that is not hybridized to the guide RNA sequence. In step (c), the 3′ end DNA strand interacts with the extended portion of the guide RNA in order to prime reverse transcription. In certain embodiments, the 3′ ended DNA strand hybridizes to a specific RT priming sequence on the extended portion of the guide RNA. In step (d), a reverse transcriptase is introduced which synthesizes a single strand of DNA from the 3′ end of the primed site towards the 3′ end of the guide RNA. This forms a single-strand DNA flap comprising the desired nucleotide change (e.g., the single base change, insertion, or deletion, or a combination thereof). In step (e), the napDNAbp and guide RNA are released. Steps (f) and (g) relate to the resolution of the single strand DNA flap such that the desired nucleotide change becomes incorporated into the target locus. This process can be driven towards the desired product formation by removing the corresponding 5′ endogenous DNA flap that forms once the 3′ single strand DNA flap invades and hybridizes to the complementary sequence on the other strand. The process can also be driven towards product formation with second strand nicking, as exemplified in FIG. 1F. This process may introduce at least one or more of the following genetic changes: transversions, transitions, deletions, and insertions.

[0102] FIG. 1H is a schematic depicting the types of genetic changes that are possible with the prime editing processes described herein. The types of nucleotide changes achievable by prime editing include deletions (including short and long deletions), single-nucleotide changes (including transitions and transversions), inversions, and insertions (including short and long deletions).

[0103] FIG. 1I is a schematic depicting temporal second strand nicking exemplified by PE3b (PE3b =PE2 prime editor fusion protein+PEgRNA+second strand nicking guide RNA). Temporal second strand nicking is a variant of second strand nicking in order to facilitate the formation of the desired edited product. The “temporal” term refers to the fact that the second-strand nick to the unedited strand occurs only after the desired edit is installed in the edited strand. This avoids concurrent nicks on both strands to lead to double-stranded DNA breaks.

[0104] FIGS. 1J-1K depict a variation of prime editing contemplated herein that replaces the napDNAbp (e.g., SpCas9 nickase) with any programmable nuclease domain, such as zinc finger nucleases (ZFN) or transcription activator-like effector nucleases (TALEN). As such, it is contemplated that suitable nucleases do not necessarily need to be “programmed” by a nucleic acid targeting molecule (such as a guide RNA), but rather, may be programmed by defining the specificity of a DNA-binding domain, such as and in particular, a nuclease. Just as in prime editing with napDNAbp moieties, it is preferable that such alternative programmable nucleases be modified such that only one strand of a target DNA is cut. In other words, the programmable nucleases should function as nickases, preferably. Once a programmable nuclease is selected (e.g., a ZFN or a TALEN), then additional functionalities may be engineered into the system to allow it to operate in accordance with a prime editing-like mechanism. For example, the programmable nucleases may be modified by coupling (e.g., via a chemical linker) an RNA or DNA extension arm thereto, wherein the extension arm comprises a primer binding site (PBS) and a DNA synthesis template. The programmable nuclease may also be coupled (e.g., via a chemical or amino acid linker) to a polymerase, the nature of which will depend upon whether the extension arm is DNA or RNA. In the case of an RNA extension arm, the polymerase can be an RNA-dependent DNA polymerase (e.g., reverse transcriptase). In the case of a DNA extension arm, the polymerase can be a DNA-dependent DNA polymerase (e.g., a prokaryotic polymerase, including Pol I, Pol II, or Pol III, or a eukaryotic polymerase, including Pol a, Pol b, Pol g, Pol d, Pol e, or Pol z). The system may also include other functionalities added as fusions to the programmable nucleases, or added in trans to facilitate the reaction as a whole (e.g., (a) a helicase to unwind the DNA at the cut site to make the cut strand with the 3′ end available as a primer, (b) a flap endonuclease (e.g., FEN1) to help remove the endogenous strand on the cut strand to drive the reaction towards replacement of the endogenous strand with the synthesized strand, or (c) a nCas9:gRNA complex to create a second site nick on the opposite strand, which may help drive the integration of the synthesize repair through favored cellular repair of the non-edited strand). In an analogous manner to prime editing with a napDNAbp, such a complex with an otherwise programmable nuclease could be used to synthesize and then install a newly synthesized replacement strand of DNA carrying an edit of interest permanently into a target site of DNA.

[0105] FIG. 1L depicts, in one embodiment, the anatomical features of a target DNA that may be edited by prime editing. The target DNA comprises a “non-target strand” and a “target strand.” The target-strand is the strand that becomes annealed to the spacer of a PEgRNA of a prime editor complex that recognizes the PAM site (in this case, NGG, which is recognized by the canonical SpCas9-based prime editors) The target strand may also be referred to as the “non-PAM strand” or the “non-edit strand.” By contrast, the non-target strand (i.e., the strand containing the protospacer and the PAM sequence of NGG) may be referred to as the “PAM-strand” or the “edit strand.” In various embodiments, the nick site of the PE complex will be in the protospacer on the PAM-strand (e.g., with the SpCas9-based PE). The location of the nick will be characteristic of the particular Cas9 that forms the PE. For example, with an SpCas9-based PE, the nick site in the phosphodiester bond between bases three (“-3” position relative to the position 1 of the PAM sequence) and four (“-4” position relative to position 1 of the PAM sequence). The nick site in the protospacer forms a free 3′ hydroxyl group, which as seen in the following figures, complexes with the primer binding site of the extension arm of the PEgRNA and provides the substrate to begin polymerization of a single strand of DNA code for by the DNA synthesis template of the extension arm of the PEgRNA. This polymerization reaction is catalyzed by the polymerase (e.g., reverse transcriptase) of the PE fusion protein in the 5′ to 3′ direction. Polymerization terminates before reaching the gRNA core (e.g., by inclusion of a polymerization termination signal, or secondary structure, which functions to terminate the polymerization activity of PE), producing a single strand DNA flap that is extended from the original 3′ hydroxyl group of the nicked PAM strand. The DNA synthesis template codes for a single strand DNA that is homologous to the endogenous 5′-ended single strand of DNA that immediately follows the nick site on the PAM strand and incorporates the desired nucleotide change (e.g., single base substitution, insertion, deletion, inversion). The position of the desired edit can be in any position following downstream of the nick site on the PAM strand, which can include position +1, +2, +3, +4 (the start of the PAM site), +5 (position 2 of the PAM site), +6 (position 3 of the PAM site), +7, +8, +9, +10, +11, +12, +13, +14, +15, +16, +17, +18, +19, +20, +21, +22, +23, +24, +25, +26, +27, +28, +29, +30, +31, +32, +33, +34, +35, +36, +37, +38, +39, +40, +41, +42, +43, +44, +45, +46, +47, +48, +49, +50, +51, +52, +53, +54, +55, +56, +57, +58, +59, +60, +61, +62, +63, +64, +65, +66, +67, +68, +69, +70, +71, +72, +73, +74, +75, +76, +77, +78, +79, +80, +81, +82, +83, +84, +85, +86, +87, +88, +89, +90, +91, +92, +93, +94, +95, +96, +97, +98, +99, +100, +101, +102, +103, +104, +105, +106, +107, +108, +109, +110, +111, +112, +113, +114, +115, +116, +117, +118, +119, +120, +121, +122, +123, +124, +125, +126, +127, +128, +129, +130, +131, +132, +133, +134, +135, +136, +137, +138, +139, +140, +141, +142, +143, +144, +145, +146, +147, +148, +149, or +150, or more (relative to the downstream position of the nick site). Once the 3′ end single stranded DNA (containing the edit of interest) replaces the endogenous 5′ end single stranded DNA, the DNA repair and replication processes will result in permanent installation of the edit site on the PAM strand, and then correction of the mismatch on the non-PAM strand that will exist at the edit site. In this way, the edit will extend to both strands of DNA on the target DNA site. It will be appreciated that reference to “edited strand” and “non-edited” strand only intends to delineate the strands of DNA involved in the PE mechanism. The “edited strand” is the strand that first becomes edited by replacement of the 5′ ended single strand DNA immediately downstream of the nick site with the synthesized 3′ ended single stranded DNA containing the desired edit. The “non-edited” strand is the strand pair with the edited strand, but which itself also becomes edited through repair and/or replication to be complementary to the edited strand, and in particular, the edit of interest.

[0106] FIG. 1M depicts the mechanism of prime editing showing the anatomical features of the target DNA, prime editor complex, and the interaction between the PEgRNA and the target DNA. First, a prime editor comprising a fusion protein having a polymerase (e.g., reverse transcriptase) and a napDNAbp (e.g., SpCas9 nickase, e.g., a SpCas9 having a deactivating mutation in an HNH nuclease domain (e.g., H840A) or a deactivating mutation in a RuvC nuclease domain (D10A)) is complexed with a PEgRNA and DNA having a target DNA to be edited. The PEgRNA comprises a spacer, gRNA core (aka gRNA scaffold or gRNA backbone) (which binds to the napDNAbp), and an extension arm. The extension arm can be at the 3′ end, the 5′ end, or somewhere within the PEgRNA molecule. As shown, the extension arm is at the 3′ end of the PEgRNA. The extension arm comprises in the 3′ to 5′ direction a primer binding site and a DNA synthesis template (comprising both an edit of interest and regions of homology (i.e., homology arms) that are homologous with the 5′ ended single stranded DNA immediately following the nick site on the PAM strand. As shown, once the nick is introduced thereby producing a free 3′ hydroxyl group immediately upstream of the nick site, the region immediately upstream of the nick site on the PAM strand anneals to a complementary sequence at the 3′ end of the extension arm referred to as the “primer binding site,” creating a short double-stranded region with an available 3′ hydroxyl end, which forms a substrate for the polymerase of the prime editor complex. The polymerase (e.g., reverse transcriptase) then polymerase as strand of DNA from the 3′ hydroxyl end to the end of the extension arm. The sequence of the single stranded DNA is coded for by the DNA synthesis template, which is the portion of the extension arm (i.e., excluding the primer binding site) that is “read” by the polymerase to synthesize new DNA. This polymerization effectively extends the sequence of the original 3′ hydroxyl end of the initial nick site. The DNA synthesis template encodes a single strand of DNA that comprises not only the desired edit, but also regions that are homologous to the endogenous single strand of DNA immediately downstream of the nick site on the PAM strand. Next, the encoded 3′ ended single strand of DNA (i.e., the 3′ single strand DNA flap) displaces the corresponding homologous endogenous 5′-ended single strand of DNA immediately downstream of the nick site on the PAM strand, forming a DNA intermediate having a 5′-ended single strand DNA flap, which is removed by the cell (e.g., by a flap endonuclease). The 3′-ended single strand DNA flap, which anneals to the complement of the endogenous 5′-ended single strand DNA flap, is ligated to the endogenous strand after the 5′ DNA flap is removed. The desired edit in the 3′ ended single strand DNA flap, now annealed and ligate, forms a mismatch with the complement strand, which undergoes DNA repair and/or a round of replication, thereby permanently installing the desired edit on both strands.

[0107] FIG. 2 shows three Cas complexes (SpCas9, SaCas9, and LbCas12a) that can be used in the herein described prime editors and their PAM, gRNA, and DNA cleavage features. The figure shows designs for complexes involving SpCas9, SaCas9, and LbCas12a.

[0108] FIGS. 3A-3F show designs for engineered 5′ prime editor gRNA (FIG. 3A), 3′ prime editor gRNA (FIG. 3B), and an intramolecular extension (FIG. 3C). The extended guide RNA (or extended gRNA) may also be referred to herein as PEgRNA or “prime editing guide RNA.” FIG. 3D and FIG. 3E provide additional embodiments of 3′ and 5′ prime editor gRNAs (PEgRNAs), respectively. FIG. 3F illustrates the interaction between a 3′ end prime editor guide RNA with a target DNA sequence. The embodiments of FIGS. 3A-3C depict exemplary arrangements of the reverse transcription template sequence (i.e., or more broadly referred to as a DNA synthesis template, as indicated, since the RT is only one type of polymerase that may be used in the context of prime editors), the primer binding site, and an optional linker sequence in the extended portions of the 3′, 5′, and intramolecular versions, as well as the general arrangements of the spacer and core regions. The disclosed prime editing process is not limited to these configurations of extended guide RNAs. The embodiment of FIG. 3D provides the structure of an exemplary PEgRNA contemplated herein. The PEgRNA comprises three main component elements ordered in the 5′ to 3′ direction, namely: a spacer, a gRNA core, and an extension arm at the 3′ end. The extension arm may further be divided into the following structural elements in the 5′ to 3′ direction, namely: a primer binding site (A), an edit template (B), and a homology arm (C). In addition, the PEgRNA may comprise an optional 3′ end modifier region (e1) and an optional 5′ end modifier region (e2). Still further, the PEgRNA may comprise a transcriptional termination signal at the 3′ end of the PEgRNA (not depicted). These structural elements are further defined herein. The depiction of the structure of the PEgRNA is not meant to be limiting and embraces variations in the arrangement of the elements. For example, the optional sequence modifiers (e1) and (e2) could be positioned within or between any of the other regions shown, and not limited to being located at the 3′ and 5′ ends. The PEgRNA could comprise, in certain embodiments, secondary RNA structure, such as, but not limited to, hairpins, stem/loops, toe loops, RNA-binding protein recruitment domains (e.g., the MS2 aptamer which recruits and binds to the MS2cp protein). For instance, such secondary structures could be position within the spacer, the gRNA core, or the extension arm, and in particular, within the e1 and/or e2 modifier regions. In addition to secondary RNA structures, the PEgRNAs could comprise (e.g., within the e1 and/or e2 modifier regions) a chemical linker or a poly(N) linker or tail, where “N” can be any nucleobase. In some embodiments (e.g., as shown in FIG. 72(c)), the chemical linker may function to prevent reverse transcription of the sgRNA scaffold or core. In addition, in certain embodiments (e.g., see FIG. 72(c)), the extension arm (3) could be comprised of RNA or DNA, and/or could include one or more nucleobase analogs (e.g., which might add functionality, such as temperature resilience). Still further, the orientation of the extension arm (3) can be in the natural 5′-to-3′ direction, or synthesized in the opposite orientation in the 3′-to-5′ direction (relative to the orientation of the PEgRNA molecule overall). It is also noted that one of ordinary skill in the art will be able to select an appropriate DNA polymerase, depending on the nature of the nucleic acid materials of the extension arm (i.e., DNA or RNA), for use in prime editing that may be implemented either as a fusion with the napDNAbp or as provided in trans as a separate moiety to synthesize the desired template-encoded 3′ single-strand DNA flap that includes the desired edit. For example, if the extension arm is RNA, then the DNA polymerase could be a reverse transcriptase or any other suitable RNA-dependent DNA polymerase. However, if the extension arm is DNA, then the DNA polymerase could be a DNA-dependent DNA polymerase. In various embodiments, provision of the DNA polymerase could be in trans, e.g., through the use of an RNA-protein recruitment domain (e.g., an MS2 hairpin installed on the PEgRNA (e.g., in the e1 or e2 region, or elsewhere and an MS2cp protein fused to the DNA polymerase, thereby co-localizing the DNA polymerase to the PEgRNA). It is also noted that the primer binding site does not generally form a part of the template that is used by the DNA polymerase (e.g., reverse transcriptase) to encode the resulting 3′ single-strand DNA flap that includes the desired edit. Thus, the designation of the “DNA synthesis template” refers to the region or portion of the extension arm (3) that is used as a template by the DNA polymerase to encode the desired 3′ single-strand DNA flap containing the edit and regions of homology to the 5′ endogenous single strand DNA flap that is replaced by the 3′ single strand DNA strand product of prime editing DNA synthesis. In some embodiments, the DNA synthesis template includes the “edit template” and the “homology arm”, or one or more homology arms, e.g., before and after the edit template. The edit template can be as small as a single nucleotide substitution, or it may be an insertion, or an inversion of DNA. In addition, the edit template may also include a deletion, which can be engineered by encoding homology arm that contains a desired deletion. In other embodiments, the DNA synthesis template may also include the e2 region or a portion thereof. For instance, if the e2 region comprises a secondary structure that causes termination of DNA polymerase activity, then it is possible that DNA polymerase function will be terminated before any portion of the e2 region is actual encoded into DNA. It is also possible that some or even all of the e2 region will be encoded into DNA. How much of e2 is actually used as a template will depend on its constitution and whether that constitution interrupts DNA polymerase function.

[0109] The embodiment of FIG. 3E provides the structure of another PEgRNA contemplated herein. The PEgRNA comprises three main component elements ordered in the 5′ to 3′ direction, namely: a spacer, a gRNA core, and an extension arm at the 3′ end. The extension arm may further be divided into the following structural elements in the 5′ to 3′ direction, namely: a primer binding site (A), an edit template (B), and a homology arm (C). In addition, the PEgRNA may comprise an optional 3′ end modifier region (e1) and an optional 5′ end modifier region (e2). Still further, the PEgRNA may comprise a transcriptional termination signal on the 3′ end of the PEgRNA (not depicted). These structural elements are further defined herein. The depiction of the structure of the PEgRNA is not meant to be limiting and embraces variations in the arrangement of the elements. For example, the optional sequence modifiers (e1) and (e2) could be positioned within or between any of the other regions shown, and not limited to being located at the 3′ and 5′ ends. The PEgRNA could comprise, in certain embodiments, secondary RNA structures, such as, but not limited to, hairpins, stem/loops, toe loops, RNA-binding protein recruitment domains (e.g., the MS2 aptamer which recruits and binds to the MS2cp protein). These secondary structures could be positioned anywhere in the PEgRNA molecule. For instance, such secondary structures could be position within the spacer, the gRNA core, or the extension arm, and in particular, within the e 1 and/or e2 modifier regions. In addition to secondary RNA structures, the PEgRNAs could comprise (e.g., within the e1 and/or e2 modifier regions) a chemical linker or a poly(N) linker or tail, where “N” can be any nucleobase. In some embodiments (e.g., as shown in FIG. 72(c)), the chemical linker may function to prevent reverse transcription of the sgRNA scaffold or core. In addition, in certain embodiments (e.g., see FIG. 72(c)), the extension arm (3) could be comprised of RNA or DNA, and/or could include one or more nucleobase analogs (e.g., which might add functionality, such as temperature resilience). Still further, the orientation of the extension arm (3) can be in the natural 5′-to-3′ direction, or synthesized in the opposite orientation in the 3′-to-5′ direction (relative to the orientation of the PEgRNA molecule overall). It is also noted that one of ordinary skill in the art will be able to select an appropriate DNA polymerase, depending on the nature of the nucleic acid materials of the extension arm (i.e., DNA or RNA), for use in prime editing that may be implemented either as a fusion with the napDNAbp or as provided in trans as a separate moiety to synthesize the desired template-encoded 3′ single-strand DNA flap that includes the desired edit. For example, if the extension arm is RNA, then the DNA polymerase could be a reverse transcriptase or any other suitable RNA-dependent DNA polymerase. However, if the extension arm is DNA, then the DNA polymerase could be a DNA-dependent DNA polymerase. In various embodiments, provision of the DNA polymerase could be in trans, e.g., through the use of an RNA-protein recruitment domain (e.g., an MS2 hairpin installed on the PEgRNA (e.g., in the e1 or e2 region, or elsewhere and an MS2cp protein fused to the DNA polymerase, thereby co-localizing the DNA polymerase to the PEgRNA). It is also noted that the primer binding site does not generally form a part of the template that is used by the DNA polymerase (e.g., reverse transcriptase) to encode the resulting 3′ single-strand DNA flap that includes the desired edit. Thus, the designation of the “DNA synthesis template” refers to the region or portion of the extension arm (3) that is used as a template by the DNA polymerase to encode the desired 3′ single-strand DNA flap containing the edit and regions of homology to the 5′ endogenous single strand DNA flap that is replaced by the 3′ single strand DNA strand product of prime editing DNA synthesis. In some embodiments, the DNA synthesis template includes the “edit template” and the “homology arm”, or one or more homology arms, e.g., before and after the edit template. The edit template can be as small as a single nucleotide substitution, or it may be an insertion, or an inversion of DNA. In addition, the edit template may also include a deletion, which can be engineered by encoding homology arm that contains a desired deletion. In other embodiments, the DNA synthesis template may also include the e2 region or a portion thereof. For instance, if the e2 region comprises a secondary structure that causes termination of DNA polymerase activity, then it is possible that DNA polymerase function will be terminated before any portion of the e2 region is actual encoded into DNA. It is also possible that some or even all of the e2 region will be encoded into DNA. How much of e2 is actually used as a template will depend on its constitution and whether that constitution interrupts DNA polymerase function.

[0110] The schematic of FIG. 3F depicts the interaction of a typical PEgRNA with a target site of a double stranded DNA and the concomitant production of a 3′ single stranded DNA flap containing the genetic change of interest. The double strand DNA is shown with the top strand (i.e., the target strand) in the 3′ to 5′ orientation and the lower strand (i.e., the PAM strand or non-target strand) in the 5′ to 3′ direction. The top strand comprises the complement of the “protospacer” and the complement of the PAM sequence and is referred to as the “target strand” because it is the strand that is target by and anneals to the spacer of the PEgRNA. The complementary lower strand is referred to as the “non-target strand” or the “PAM strand” or the “protospacer strand” since it contains the PAM sequence (e.g., NGG) and the protospacer. Although not shown, the PEgRNA depicted would be complexed with a Cas9 or equivalent domain of a prime editor fusion protein. As shown in the schematic, the spacer of the PEgRNA anneals to the complementary region of the protospacer on the target strand. This interaction forms as DNA/RNA hybrid between the spacer RNA and the complement of the protospacer DNA, and induces the formation of an R loop in the protospacer. As taught elsewhere herein, the Cas9 protein (not shown) then induces a nick in the non-target strand, as shown. This then leads to the formation of the 3′ ssDNA flap region immediately upstream of the nick site which, in accordance with *z*, interacts with the 3′ end of the PEgRNA at the primer binding site. The 3′ end of the ssDNA flap (i.e., the reverse transcriptase primer sequence) anneals to the primer binding site (A) on the PEgRNA, thereby priming reverse transcriptase. Next, reverse transcriptase (e.g., provided in trans or provided cis as a fusion protein, attached to the Cas9 construct) then polymerizes a single strand of DNA which is coded for by the DNA synthesis template (including the edit template (B) and homology arm (C)). The polymerization continues towards the 5′ end of the extension arm. The polymerized strand of ssDNA forms a ssDNA 3′ end flap which, as describe elsewhere (e.g., as shown in FIG. 1G), invades the endogenous DNA, displacing the corresponding endogenous strand (which is removed as a 5′ ended DNA flap of endogenous DNA), and installing the desired nucleotide edit (single nucleotide base pair change, deletions, insertions (including whole genes) through naturally occurring DNA repair/replication rounds.

[0111] FIG. 3G depicts yet another embodiment of prime editing contemplated herein. In particular, the top schematic depicts one embodiment of a prime editor (PE), which comprises a fusion protein of a napDNAbp (e.g., SpCas9) and a polymerase (e.g., a reverse transcriptase), which are joined by a linker. The PE forms a complex with a PEgRNA by binding to the gRNA core of the PEgRNA. In the embodiment shown, the PEgRNA is equipped with a 3′ extension arm that comprises, beginning at the 3′ end, a primer binding site (PBS) followed by a DNA synthesis template. The bottom schematic depicts a variant of a prime editor, referred to as a “trans prime editor (tPE).” In this embodiment, the DNA synthesis template and PBS are decoupled from the PEgRNA and presented on a separate molecule, referred to as a trans prime editor RNA template (“tPERT”), which comprises an RNA-protein recruitment domain (e.g., a MS2 hairpin). The PE itself is further modified to comprise a fusion to a rPERT recruiting protein (“RP”), which is a protein which specifically recognizes and binds to the RNA-protein recruitment domain In the example where the RNA-protein recruitment domain is an MS2 hairpin, the corresponding rPERT recruiting protein can be MS2cp of the MS2 tagging system. The MS2 tagging system is based on the natural interaction of the MS2 bacteriophage coat protein (“MCP” or “MS2cp”) with a stem-loop or hairpin structure present in the genome of the phage, i.e., the “MS2 hairpin” or “MS2 aptamer.” In the case of trans prime editing, the RP-PE:gRNA complex “recruits” a tPERT having the appropriate RNA-protein recruitment domain to co-localize with the PE:gRNA complex, thereby providing the PBS and DNA synthesis template in trans for use in prime editing, as shown in the example depicted in FIG. 3H.

[0112] FIG. 3H depicts the process of trans prime editing. In this embodiment, the trans prime editor comprises a “PE2” prime editor (i.e., a fusion of a Cas9(H840A) and a variant MMLV RT) fused to an MS2cp protein (i.e., a type of recruiting protein that recognizes and binds to an MS2 aptamer) and which is complexed with an sgRNA (i.e., a standard guide RNA as opposed to a PEgRNA). The trans prime editor binds to the target DNA and nicks the nontarget strand. The MS2cp protein recruits a tPERT in trans through the specific interaction with the RNA-protein recruitment domain on the tPERT molecule. The tPERT becomes co-localized with the trans prime editor, thereby providing the PBS and DNA synthesis template functions in trans for use by the reverse transcriptase polymerase to synthesize a single strand DNA flap having a 3′ end and containing the desired genetic information encoded by the DNA synthesis template.

[0113] FIGS. 4A-4E demonstrate in vitro TPRT assays (i.e., prime editing assays). FIG. 4A is a schematic of fluorescently labeled DNA substrates gRNA templated extension by an RT enzyme, PAGE. FIG. 4B shows TPRT (i.e., prime editing) with pre-nicked substrates, dCas9, and 5′-extended gRNAs of differing synthesis template length. FIG. 4C shows the RT reaction with pre-nicked DNA substrates in the absence of Cas9. FIG. 4D shows TPRT (i.e., prime editing) on full dsDNA substrates with Cas9(H840A) and 5′-extended gRNAs. FIG. 4E shows a 3′-extended gRNA template with pre-nicked and full dsDNA substrates. All reactions are with M-MLV RT.

[0114] FIG. 5 shows in vitro validations using 5′-extended gRNAs with varying length synthesis templates. Fluorescently labeled (Cy5) DNA targets were used as substrates, and were pre-nicked in this set of experiments. The Cas9 used in these experiments is catalytically dead Cas9 (dCas9), and the RT used is Superscript III, a commercial RT derived from the Moloney-Murine Leukemia Virus (M-MLV). dCas9:gRNA complexes were formed from purified components. Then, the fluorescently labeled DNA substrate was added along with dNTPs and the RT enzyme. After 1 hour of incubation at 37° C., the reaction products were analyzed by denaturing urea-polyacrylamide gel electrophoresis (PAGE). The gel image shows extension of the original DNA strand to lengths that are consistent with the length of the reverse transcription template.

[0115] FIG. 6 shows in vitro validations using 5′-extended gRNAs with varying length synthesis templates, which closely parallels those shown in FIG. 5. However, the DNA substrates are not pre-nicked in this set of experiments. The Cas9 used in these experiments is a Cas9 nickase (SpyCas9 H840A mutant) and the RT used is Superscript III, a commercial RT derived from the Moloney-Murine Leukemia Virus (M-MLV). The reaction products were analyzed by denaturing urea-polyacrylamide gel electrophoresis (PAGE). As shown in the gel, the nickase efficiently cleaves the DNA strand when the standard gRNA is used (gRNA_0, lane 3).

[0116] FIG. 7 demonstrates that 3′ extensions support DNA synthesis and do not significantly effect Cas9 nickase activity. Pre-nicked substrates (black arrow) are near-quantitatively converted to RT products when either dCas9 or Cas9 nickase is used (lanes 4 and 5). Greater than 50% conversion to the RT product (red arrow) is observed with full substrates (lane 3). Cas9 nickase (SpyCas9 H840A mutant), catalytically dead Cas9 (dCas9) and Superscript III, a commercial RT derived from the Moloney-Murine Leukemia Virus (M-MLV) are used.

[0117] FIG. 8 demonstrates dual color experiments that were used to determine if the RT reaction preferentially occurs with the gRNA in cis (bound in the same complex). Two separate experiments were conducted for 5′-extended and 3′-extended gRNAs. Products were analyzed by PAGE. Product ratio calculated as (Cy3cis/Cy3trans)/(Cy5trans/Cy5cis).

[0118] FIGS. 9A-9D demonstrates a flap model substrate. FIG. 9A shows a dual-FP reporter for flap-directed mutagenesis. FIG. 9B shows stop codon repair in HEK cells. FIG. 9C shows sequenced yeast clones after flap repair. FIG. 9D shows testing of different flap features in human cells.

[0119] FIG. 10 demonstrates prime editing on plasmid substrates. A dual-fluorescent reporter plasmid was constructed for yeast (S. cerevisiae) expression. Expression of this construct in yeast produces only GFP. The in vitro prime editing reaction introduces a point mutation, and transforms the parent plasmid or an in vitro Cas9(H840A) nicked plasmid into yeast. The colonies are visualized by fluorescence imaging. Yeast dual-FP plasmid transformants are shown. Transforming the parent plasmid or an in vitro Cas9(H840A) nicked plasmid results in only green GFP expressing colonies. The prime editing reaction with 5′-extended or 3′-extended gRNAs produces a mix of green and yellow colonies. The latter express both GFP and mCherry. More yellow colonies are observed with the 3′-extended gRNA. A positive control that contains no stop codon is shown as well.

[0120] FIG. 11 shows prime editing on plasmid substrates similar to the experiment in FIG. 10, but instead of installing a point mutation in the stop codon, prime editing installs a single nucleotide insertion (left) or deletion (right) that repairs a frameshift mutation and allows for synthesis of downstream mCherry. Both experiments used 3′ extended gRNAs.

[0121] FIG. 12 shows editing products of prime editing on plasmid substrates, characterized by Sanger sequencing. Individually colonies from the TRT transformations were selected and analyzed by Sanger sequencing. Precise edits were observed by sequencing select colonies. Green colonies contained plasmids with the original DNA sequence, while yellow colonies contained the precise mutation designed by the prime editing gRNA. No other point mutations or indels were observed.

[0122] FIG. 13 shows the potential scope for the new prime editing technology is shown and compared to deaminase-mediated base editor technologies.

[0123] FIG. 14 shows a schematic of editing in human cells.

[0124] FIG. 15 demonstrates the extension of the primer binding site in gRNA.

[0125] FIG. 16 shows truncated gRNAs for adjacent targeting.

[0126] FIGS. 17A-17C are graphs displaying the % T to A conversion at the target nucleotide after transfection of components in human embryonic kidney (HEK) cells. FIG. 17A shows data, which presents results using an N-terminal fusion of wild type MLV reverse transcriptase to Cas9(H840A) nickase (32-amino acid linker). FIG. 17B is similar to FIG. 17A, but for C-terminal fusion of the RT enzyme. FIG. 17C is similar to FIG. 17A but the linker between the MLV RT and Cas9 is 60 amino acids long instead of 32 amino acids.

[0127] FIG. 18 shows high purity T to A editing at HEK3 site by high-throughput amplicon sequencing. The output of sequencing analysis displays the most abundant genotypes of edited cells.

[0128] FIG. 19 shows editing efficiency at the target nucleotide (blue bars) alongside indel rates (orange bars). WT refers to the wild type MLV RT enzyme. The mutant enzymes (Ml through M4) contain the mutations listed to the right. Editing rates were quantified by high throughput sequencing of genomic DNA amplicons.

[0129] FIG. 20 shows editing efficiency of the target nucleotide when a single strand nick is introduced in the complementary DNA strand in proximity to the target nucleotide. Nicking at various distances from the target nucleotide was tested (triangles). Editing efficiency at the target base pair (blue bars) is shown alongside the indel formation rate (orange bars). The “none” example does not contain a complementary strand nicking guide RNA. Editing rates were quantified by high throughput sequencing of genomic DNA amplicons.

[0130] FIG. 21 demonstrates processed high throughput sequencing data showing the desired T to A transversion mutation and general absence of other major genome editing byproducts.

[0131] FIG. 22 provides a schematic of an exemplary process for conducting targeted mutagenesis with an error-prone reverse transcriptase on a target locus using a nucleic acid programmable DNA binding protein (napDNAbp) complexed with an extended guide RNA, i.e., prime editing with an error-prone RT. This process may be referred to as an embodiment of prime editing for targeted mutagenesis. The extended guide RNA comprises an extension at the 3′ or 5′ end of the guide RNA, or at an intramolecular location in the guide RNA. In step (a), the napDNAbp/gRNA complex contacts the DNA molecule and the gRNA guides the napDNAbp to bind to the target locus to be mutagenized. In step (b), a nick in one of the strands of DNA of the target locus is introduced (e.g., by a nuclease or chemical agent), thereby creating an available 3′ end in one of the strands of the target locus. In certain embodiments, the nick is created in the strand of DNA that corresponds to the R-loop strand, i.e., the strand that is not hybridized to the guide RNA sequence. In step (c), the 3′ end DNA strand interacts with the extended portion of the guide RNA in order to prime reverse transcription. In certain embodiments, the 3′ ended DNA strand hybridizes to a specific RT priming sequence on the extended portion of the guide RNA. In step (d), an error-prone reverse transcriptase is introduced which synthesizes a mutagenized single strand of DNA from the 3′ end of the primed site towards the 3′ end of the guide RNA. Exemplary mutations are indicated with an asterisk “*”. This forms a single-strand DNA flap comprising the desired mutagenized region. In step (e), the napDNAbp and guide RNA are released. Steps (f) and (g) relate to the resolution of the single strand DNA flap (comprising the mutagenized region) such that the desired mutagenized region becomes incorporated into the target locus. This process can be driven towards the desired product formation by removing the corresponding 5′ endogenous DNA flap that forms once the 3′ single strand DNA flap invades and hybridizes to the complementary sequence on the other strand. The process can also be driven towards product formation with second strand nicking, as exemplified in FIG. 1F. Following endogenous DNA repair and/or replication processes, the mutagenized region becomes incorporated into both strands of DNA of the DNA locus.

[0132] FIG. 23 is a schematic of gRNA design for contracting trinucleotide repeat sequences and trinucleotide repeat contraction with TPRT genome editing (i.e., prime editing). Trinucleotide repeat expansion is associated with a number of human diseases, including Huntington's disease, Fragile X syndrome, and Friedreich's ataxia. The most common trinucleotide repeat contains CAG triplets, though GAA triplets (Friedreich's ataxia) and CGG triplets (Fragile X syndrome) also occur. Inheriting a predisposition to expansion, or acquiring an already expanded parental allele, increases the likelihood of acquiring the disease. Pathogenic expansions of trinucleotide repeats could hypothetically be corrected using prime editing. A region upstream of the repeat region can be nicked by an RNA-guided nuclease, then used to prime synthesis of a new DNA strand that contains a healthy number of repeats (which depends on the particular gene and disease). After the repeat sequence, a short stretch of homology is added that matches the identity of the sequence adjacent to the other end of the repeat (red strand). Invasion of the newly synthesized strand, and subsequent replacement of the endogenous DNA with the newly synthesized flap, leads to a contracted repeat allele.

[0133] FIG. 24 is a schematic showing precise 10-nucleotide deletion with prime editing. A guide RNA targeting the HEK3 locus was designed with a reverse transcription template that encodes a 10-nucleotide deletion after the nick site. Editing efficiency in transfected HEK cells was assessed using amplicon sequencing.

[0134] FIG. 25 is a schematic showing gRNA design for peptide tagging genes at endogenous genomic loci and peptide tagging with TPRT genome editing (i.e., prime editing). The FlAsH and ReAsH tagging systems comprise two parts: (1) a fluorophore-biarsenical probe, and (2) a genetically encoded peptide containing a tetracysteine motif, exemplified by the sequence FLNCCPGCCMEP (SEQ ID NO: 1). When expressed within cells, proteins containing the tetracysteine motif can be fluorescently labeled with fluorophore-arsenic probes (see ref: J. Am. Chem. Soc., 2002, 124 (21), pp 6063-6076. DOI: 10.1021/ja017687n). The “sortagging” system employs bacterial sortase enzymes that covalently conjugate labeled peptide probes to proteins containing suitable peptide substrates (see ref: Nat. Chem. Biol. 2007 November; 3(11):707-8. DOI: 10.1038/nchembio.2007.31). The FLAG-tag (DYKDDDDK (SEQ ID NO: 2)), V5-tag (GKPIPNPLLGLDST (SEQ ID NO: 3)), GCN4-tag (EELLSKNYHLENEVARLKK (SEQ ID NO: 4)), HA-tag (YPYDVPDYA (SEQ ID NO: 5)), and Myc-tag (EQKLISEEDL (SEQ ID NO: 6)) are commonly employed as epitope tags for immunoassays. The pi-clamp encodes a peptide sequence (FCPF (SEQ ID NO: 622)) that can by labeled with a pentafluoro-aromatic substrates (ref: Nat. Chem. 2016 Feb; 8(2):120-8. doi: 10.1038/nchem.2413).

[0135] FIG. 26A shows precise installation of a His₆-tag and a FLAG-tag into genomic DNA. A guide RNA targeting the HEK3 locus was designed with a reverse transcription template that encodes either an 18-nt His-tag insertion or a 24-nt FLAG-tag insertion. Editing efficiency in transfected HEK cells was assessed using amplicon sequencing. Note that the full 24-nt sequence of the FLAG-tag is outside of the viewing frame (sequencing confirmed full and precise insertion). FIG. 26B shows a schematic outlining various applications involving protein/peptide tagging, including (a) rendering proteins soluble or insoluble, (b) changing or tracking the cellular localization of a protein, (c) extending the half-life of a protein, (d) facilitating protein purification, and (e) facilitating the detection of proteins.

[0136] FIG. 27 shows an overview of prime editing by installing a protective mutation in PRNP that prevents or halts the progression of prion disease. The PEgRNA sequences correspond to residue numbers 1-20 of SEQ ID NO: 810 on the left (i.e., 5′ of the sgRNA scaffold) and residue numbers 21-43 ofSEQ ID NO: 810 on the right (i.e., 3′ of the sgRNA scaffold).

[0137] FIG. 28A is a schematic of PE-based insertion of sequences encoding RNA motifs. FIG. 28B is a list (not exhaustive) of some example motifs that could potentially be inserted, and their functions.

[0138] FIG. 29A is a depiction of a prime editor. FIG. 29B shows possible modifications to genomic, plasmid, or viral DNA directed by a PE. FIG. 29C shows an example scheme for insertion of a library of peptide loops into a specified protein (in this case GFP) via a library of PEgRNAs. FIG. 29D shows an example of possible programmable deletions of codons or N-, or C-terminal truncations of a protein using different PEgRNAs. Deletions would be predicted to occur with minimal generation of frameshift mutations.

[0139] FIG. 30 shows a possible scheme for iterative insertion of codons in a continual evolution system, such as PACE.

[0140] FIG. 31 is an illustration of an engineered gRNA showing the gRNA core, ˜20nt spacer matching the sequence of the targeted gene, the reverse transcription template with immunogenic epitope nucleotide sequence and the primer binding site matching the sequence of the targeted gene.

[0141] FIG. 32 is a schematic showing using prime editing as a means to insert known immunogenicity epitopes into endogenous or foreign genomic DNA, resulting in modification of the corresponding proteins.

[0142] FIG. 33 is a schematic showing PEgRNA design for primer binding sequence insertions and primer binding insertion into genomic DNA using prime editing for determining off-target editing. In this embodiment, prime editing is conducted inside a living cell, a tissue, or an animal model. As a first step, an appropriate PEgRNA is designed. The top schematic shows an exemplary PEgRNA that may be used in this aspect. The spacer in the PEgRNA (labeled “protospacer”) is complementary to one of the strands of the genomic target. The PE:PEgRNA complex (i.e., the PE complex) installs a single stranded 3′ end flap at the nick site which contains the encoded primer binding sequence and the region of homology (coded by the homology arm of the PEgRNA) that is complementary to the region just downstream of the cut site (in red). Through flap invasion and DNA repair/replication processes, the synthesized strand becomes incorporated into the DNA, thereby installing the primer binding site. This process can occur at the desired genomic target, but also at other genomic sites that might interact with the PEgRNA in an off-target manner (i.e., the PEgRNA guides the PE complex to other off-target sites due to the complementarity of the spacer region to other genomic sites that are not the intended genomic site). Thus, the primer binding sequence may be installed not only at the desired genomic target, but at off-target genomic sites elsewhere in the genome. In order to detect the insertion of these primer binding sites at both the intended genomic target sites and the off-target genomic sites, the genomic DNA (post-PE) can be isolated, fragmented, and ligated to adapter nucleotides (shown in red). Next, PCR may be carried out with PCR oligonucleotides that anneal to the adapters and to the inserted primer binding sequence to amplify on-target and off-target genomic DNA regions into which the primer binding site was inserted by PE. High throughput sequencing then may be conducted and sequences aligned to identify the insertion points of PE-inserted primer binding sequences at either the on-target site or at off-target sites.

[0143] FIG. 34 is a schematic showing the precise insertion of a gene with PE.

[0144] FIG. 35A is a schematic showing the natural insulin signaling pathway. FIG. 35B is a schematic showing FKBP12-tagged insulin receptor activation controlled by FK1012.

[0145] FIG. 36 shows small-molecule monomers. References: humped FK506 mimic (2)¹⁰⁷

[0146] FIGS. 37A-37B show small-molecule dimers. References: FK1012 4^{95,96}; FK1012 5¹⁰⁸; FK1012 6¹⁰⁷; AP1903 7¹⁰⁷; cyclosporin A dimer 8⁹⁸; FK506—cyclosporin A dimer (FkCsA) 9¹⁰⁰.

[0147] FIGS. 38A-38F provide an overview of prime editing and feasibility studies in vitro and in yeast cells. FIG. 38A shows the 75,122 known pathogenic human genetic variants in ClinVar (accessed July, 2019), classified by type. FIG. 38B shows that a prime editing complex consists of a prime editor (PE) protein containing an RNA-guided DNA-nicking domain, such as Cas9 nickase, fused to an engineered reverse transcriptase domain and complexed with a prime editing guide RNA (PEgRNA). The PE:PEgRNA complex binds the target DNA site and enables a large variety of precise DNA edits at a wide range of DNA positions before or after the target site's protospacer adjacent motif (PAM). FIG. 38C shows that upon DNA target binding, the PE:PEgRNA complex nicks the PAM-containing DNA strand. The resulting free 3′ end hybridizes to the primer-binding site of the PEgRNA. The reverse transcriptase domain catalyzes primer extension using the RT template of the PEgRNA, resulting in a newly synthesized DNA strand containing the desired edit (the 3′ flap).Equilibration between the edited 3′ flap and the unedited 5′ flap containing the original DNA, followed by cellular 5′ flap cleavage and ligation, and DNA repair or replication to resolve the heteroduplex DNA, results in stably edited DNA. FIG. 38D shows in vitro 5′-extended PEgRNA primer extension assays with pre-nicked dsDNA substrates containing 5′-Cy5 labeled PAM strands, dCas9, and a commercial M-MLV RT variant (RT, Superscript III). dCas9 was complexed with PEgRNAs containing RT template of varying lengths, then added to DNA substrates along with the indicated components. Reactions were incubated at 37° C. for 1 hour, then analyzed by denaturing urea PAGE and visualized for Cy5 fluorescence. FIG. 38E shows primer extension assays performed as in FIG. 38D using 3′-extended PEgRNAs pre-complexed with dCas9 or Cas9 H840A nickase, and pre-nicked or non-nicked 5′-Cy5-labeled dsDNA substrates. FIG. 38F shows yeast colonies transformed with GFP—mCherry fusion reporter plasmids edited in vitro with PEgRNAs, Cas9 nickase, and RT. Plasmids containing nonsense or frameshift mutations between GFP and mCherry were edited with 5′-extended or 3′-extended PEgRNAs that restore mCherry translation via transversion mutation, 1-bp insertion, or 1-bp deletion. GFP and mCherry double-positive cells (yellow) reflect successful editing.

[0148] FIGS. 39A-39D show prime editing of genomic DNA in human cells by PE1 and PE2. FIG. 39A shows PEgRNAs contain a spacer sequence, a sgRNA scaffold, and a 3′ extension containing a primer-binding site (green) and a reverse transcription (RT) template (purple), which contains the edited base(s) (red). The primer-binding site hybridizes to the PAM-containing DNA strand immediately upstream of the site of nicking. The RT template is homologous to the DNA sequence downstream of the nick, with the exception of the encoded edit. FIG. 39B shows an installation of a T•A-to-A•T transversion edit at the HEK3 site in HEK293T cells using Cas9 H840A nickase fused to wild-type M-MLV reverse transcriptase (PE1) and PEgRNAs of varying primer-binding site lengths. FIG. 39 Cshows the use of an engineered pentamutant M-MLV reverse transcriptase (D200N, L603W, T306K, W313F, T330P) in PE2 substantially improves prime editing transversion efficiencies at five genomic sites in HEK293T cells, and small insertion and small deletion edits at HEK3. FIG. 39D is a comparison of PE2 editing efficiencies with varying RT template lengths at five genomic sites in HEK293T cells. Values and error bars reflect the mean and s.d. of three independent biological replicates.

[0149] FIGS. 40A-40C show PE3 and PE3b systems nick the non-edited strand to increase prime editing efficiency. FIG. 40A is an overview of the prime editing by PE3. After initial synthesis of the edited strand, DNA repair will remove either the newly synthesized strand containing the edit (3′ flap excision) or the original genomic DNA strand (5′ flap excision). 5′ flap excision leaves behind a DNA heteroduplex containing one edited strand and one non-edited strand. Mismatch repair machinery or DNA replication could resolve the heteroduplex to give either edited or non-edited products. Nicking the non-edited strand favors repair of that strand, resulting in preferential generation of stable duplex DNA containing the desired edit. FIG. 40B shows the effect of complementary strand nicking on PE3-mediated prime editing efficiency and indel formation. “None” refers to PE2 controls, which do not nick the complementary strand. FIG. 40C is a comparison of editing efficiencies with PE2 (no complementary strand nick), PE3 (general complementary strand nick), and PE3b (edit-specific complementary strand nick). All editing yields reflect the percentage of total sequencing reads that contain the intended edit and do not contain indels among all treated cells, with no sorting. Values and error bars reflect the mean and s.d. of three independent biological replicates.

[0150] FIGS. 41A-41K show targeted insertions, deletions, and all 12 types of point mutations with PE3 at seven endogenous human genomic loci in HEK293T cells. FIG. 41A is a graph showing all 12 types of single-nucleotide transition and transversion edits from position +1 to +8 (counting the location of the PEgRNA-induced nick as between position +1 and −1) of the HEK3 site using a 10-nt RT template. FIG. 41B is a graph showing long-range PE3 transversion edits at the HEK3 site using a 34-nt RT template. FIGS. 41C-41H are graphs showing all 12 types of transition and transversion edits at various positions in the prime editing window for (FIG. 41C) RNF2, (FIG. 41D) FANCF, (FIG. 41E) EMX1, (FIG. 41F) RUNX1, (FIG. 41G) VEGFA, and (FIG. 41H) DNMT1. FIG. 41I is a graph showing targeted 1- and 3-bp insertions, and 1- and 3-bp deletions with PE3 at seven endogenous genomic loci. FIG. 41J is a graph showing the targeted precise deletions of 5 to 80 bp at the HEK3 target site. FIG. 41K is a graph showing a combination edits of insertions and deletions, insertions and point mutations, deletions and point mutations, and double point mutations at three endogenous genomic loci. All editing yields reflect the percentage of total sequencing reads that contain the intended edit and do not contain indels among all treated cells, with no sorting. Values and error bars reflect the mean and s.d. of three independent biological replicates.

[0151] FIGS. 42A-42H show the comparison of prime editing and base editing, and off-target editing by Cas9 and PE3 at known Cas9 off-target sites. FIG. 42A shows total C•G-to-T•A editing efficiency at the same target nucleotides for PE2, PE3, BE2max, and BE4max at endogenous HEK3, FANCF, and EMX1 sites in HEK293T cells. FIG. 42B shows indel frequency from treatments in FIG. 42A. FIG. 42C shows the editing efficiency of precise C•G-to-T•A edits (without bystander edits or indels) for PE2, PE3, BE2max, and BE4max at HEK3, FANCF, and EMX1. For EMX1, precise PE combination edits of all possible combinations of C•G-to-T•A conversion at the three targeted nucleotides are also shown. FIG. 42D shows the total A•T-to-G•C editing efficiency for PE2, PE3, ABEdmax, and ABEmax at HEK3 and FANCF. FIG. 42E shows the precise A•T-to-G•C editing efficiency without bystander edits or indels for at HEK3 and FANCF. FIG. 42F shows indel frequency from treatments in FIG. 42D. FIG. 42G shows the average triplicate editing efficiencies (percentage sequencing reads with indels) in HEK293T cells for Cas9 nuclease at four on-target and 16 known off-target sites. The 16 off-target sites examined were the top four previously reported off-target sites^{118,159} for each of the four on-target sites. For each on-target site, Cas9 was paired with a sgRNA or with each of four PEgRNAs that recognize the same protospacer. FIG. 42H shows the average triplicate on-target and off-target editing efficiencies and indel efficiencies (below in parentheses) in HEK293T cells for PE2 or PE3 paired with each PEgRNA in (FIG. 42G). On-target editing yields reflect the percentage of total sequencing reads that contain the intended edit and do not contain indels among all treated cells, with no sorting. Off-target editing yields reflect off-target locus modification consistent with prime editing. Values and error bars reflect the mean and s.d. of three independent biological replicates.

[0152] FIGS. 43A-43I show prime editing in various human cell lines and primary mouse cortical neurons, installation and correction of pathogenic transversion, insertion, or deletion mutations, and comparison of prime editing and HDR. FIG. 43A is a graph showing the installation (via T•A-to-A•T transversion) and correction (via A•T-to-T•A transversion) of the pathogenic E6V mutation in HBB in HEK293T cells. Correction either to wild-type HBB, or to HBB containing a silent mutation that disrupts the PEgRNA PAM, is shown. FIG. 43B is a graph showing the installation (via 4-bp insertion) and correction (via 4-bp deletion) of the pathogenic HEXA 1278+TATC allele in HEK293T cells. Correction either to wild-type HEXA, or to HEXA containing a silent mutation that disrupts the PEgRNA PAM, is shown. FIG. 43C is a graph showing the installation of the protective G127V variant in PRNP in HEK293T cells via G•C-to-T•A transversion. FIG. 43D is a graph showing prime editing in other human cell lines including K562 (leukemic bone marrow cells), U2OS (osteosarcoma cells), and HeLa (cervical cancer cells). FIG. 43E is a graph showing the installation of a G•C-to-T•A transversion mutation in DNMT1 of mouse primary cortical neurons using a dual split-intein PE3 lentivirus system, in which the N-terminal half is Cas9 (1-573) fused to N-intein and through a P2A self-cleaving peptide to GFP-KASH, and the C-terminal half is the C-intein fused to the remainder of PE2. PE2 halves are expressed from a human synapsin promoter that is highly specific for mature neurons. Sorted values reflect editing or indels from GFP-positive nuclei, while unsorted values are from all nuclei. FIG. 43F is a comparison of PE3 and Cas9-mediated HDR editing efficiencies at endogenous genomic loci in HEK293T cells. FIG. 43G is a comparison of PE3 and Cas9-mediated HDR editing efficiencies at endogenous genomic loci in K562, U2OS, and HeLa cells. FIG. 43H is a comparison of PE3 and Cas9-mediated HDR indel byproduct generation in HEK293T, K562, U2OS, and HeLa cells. FIG. 43I shows targeted insertion of a His6 tag (18 bp), FLAG epitope tag (24 bp), or extended LoxP site (44 bp) in HEK293T cells by PE3. All editing yields reflect the percentage of total sequencing reads that contain the intended edit and do not contain indels among all treated cells. Values and error bars reflect the mean and s.d. of three independent biological replicates.

[0153] FIGS. 44A-44G show in vitro prime editing validation studies with fluorescently labeled DNA substrates. FIG. 44A shows electrophoretic mobility shift assays with dCas9, 5′-extended PEgRNAs and 5′-Cy5-labeled DNA substrates. PEgRNAs 1 through 5 contain a 15-nt linker sequence (linker A for PEgRNA 1, linker B for PEgRNAs 2 through 5) between the spacer and the PBS, a 5-nt PBS sequence, and RT templates of 7 nt (PEgRNAs 1 and 2), 8 nt (PEgRNA 3), 15 nt (PEgRNA 4), and 22 nt (PEgRNA 5). PEgRNAs are those used in FIG. 44E and 44F; full sequences are listed in Tables 2A-2C. FIG. 44B shows in vitro nicking assays of Cas9 H840A using 5′-extended and 3′-extended PEgRNAs. FIG. 44C shows Cas9-mediated indel formation in HEK293T cells at HEK3 using 5′-extended and 3′-extended PEgRNAs. FIG. 44D shows an overview of prime editing in vitro biochemical assays. 5′-Cy5-labeled pre-nicked and non-nicked dsDNA substrates were tested. sgRNAs, 5′-extended PEgRNAs, or 3′-extended PEgRNAs were pre-complexed with dCas9 or Cas9 H840A nickase, then combined with dsDNA substrate, M-MLV RT, and dNTPs. Reactions were allowed to proceed at 37° C. for 1 hour prior to separation by denaturing urea PAGE and visualization by Cy5 fluorescence. FIG. 44E shows primer extension reactions using 5′-extended PEgRNAs, pre-nicked DNA substrates, and dCas9 lead to significant conversion to RT products. FIG. 44F shows primer extension reactions using 5′-extended PEgRNAs as in FIG. 44B, with non-nicked DNA substrate and Cas9 H840A nickase. Product yields are greatly reduced by comparison to pre-nicked substrate. FIG. 44G shows an in vitro primer extension reaction using a 3′-PEgRNA generates a single apparent product by denaturing urea PAGE. The RT product band was excised, eluted from the gel, then subjected to homopolymer tailing with terminal transferase (TdT) using either dGTP or dATP. Tailed products were extended by poly-T or poly-C primers, and the resulting DNA was sequenced. Sanger traces indicate that three nucleotides derived from the gRNA scaffold were reverse transcribed (added as the final 3′ nucleotides to the DNA product). Note that in mammalian cell prime editing experiments, PEgRNA scaffold insertion is much rarer than in vitro (FIGS. 56A-56D), potentially due to the inability of the tethered reverse transcriptase to access the Cas9-bound guide RNA scaffold, and/or cellular excision of mismatched 3′ ends of 3′ flaps containing PEgRNA scaffold sequences.

[0154] FIGS. 45A-45G show cellular repair in yeast of 3′ DNA flaps from in vitro prime editing reactions. FIG. 45A shows that dual fluorescent protein reporter plasmids contain GFP and mCherry open reading frames separated by a target site encoding an in-frame stop codon, a +1 frameshift, or a −1 frameshift. Prime editing reactions were carried out in vitro with Cas9 H840A nickase, PEgRNA, dNTPs, and M-MLV reverse transcriptase, and then transformed into yeast. Colonies that contain unedited plasmids produce GFP but not mCherry. Yeast colonies containing edited plasmids produce both GFP and mCherry as a fusion protein. FIG. 45B shows an overlay of GFP and mCherry fluorescence for yeast colonies transformed with reporter plasmids containing a stop codon between GFP and mCherry (unedited negative control, top), or containing no stop codon or frameshift between GFP and mCherry (pre-edited positive control, bottom). FIGS. 45C-45F show a visualization of mCherry and GFP fluorescence from yeast colonies transformed with in vitro prime editing reaction products. FIG. 45C shows a stop codon correction via T•A-to-A•T transversion using a 3′-extended PEgRNA, or a 5′-extended PEgRNA, as shown in FIG. 45D. FIG. 45E shows a +1 frameshift correction via a 1-bp deletion using a 3′-extended PEgRNA. FIG. 45F shows a −1 frameshift correction via a 1-bp insertion using a 3′-extended PEgRNA. FIG. 45G shows Sanger DNA sequencing traces from plasmids isolated from GFP-only colonies in FIG. 45B and GFP and mCherry double-positive colonies in FIG. 45C.

[0155] FIGS. 46A-46F show correct editing versus indel generation with PE1. FIG. 46A shows T•A-to-A•T transversion editing efficiency and indel generation by PE1 at the +1 position of HEK3 using PEgRNAs containing 10-nt RT templates and a PBS sequences ranging from 8-17 nt. FIG. 46B shows G•C-to-T•A transversion editing efficiency and indel generation by PE1 at the +5 position of EMX1 using PEgRNAs containing 13-nt RT templates and a PBS sequences ranging from 9-17 nt. FIG. 46C shows G•C-to-T•A transversion editing efficiency and indel generation by PE1 at the +5 position of FANCF using PEgRNAs containing 17-nt RT templates and a PBS sequences ranging from 8-17 nt. FIG. 46D shows C•G-to-A•T transversion editing efficiency and indel generation by PE1 at the +1 position of RNF2 using PEgRNAs containing 11-nt RT templates and a PBS sequences ranging from 9-17 nt. FIG. 46E shows G•C-to-T•A transversion editing efficiency and indel generation by PE1 at the +2 position of HEK4 using PEgRNAs containing 13-nt RT templates and a PBS sequences ranging from 7-15 nt. FIG. 46F shows PE1-mediated +1 T deletion, +1 A insertion, and +1 CTT insertion at the HEK3 site using a 13-nt PBS and 10-nt RT template. Sequences of PEgRNAs are those used in FIG. 39C (see Tables 3A-3R). Values and error bars reflect the mean and s.d. of three independent biological replicates.

[0156] FIGS. 47A-47S show the evaluation of M-MLV RT variants for prime editing. FIG. 47A shows the abbreviations for prime editor variants used in this figure. FIG. 47B shows targeted insertion and deletion edits with PE1 at the HEK3 locus. FIGS. 47C-47H show a comparison of 18 prime editor constructs containing M-MLV RT variants for their ability to install a +2 G•C-to-C•G transversion edit at HEK3 as shown in FIG. 47C, a 24-bp FLAG insertion at HEK3 as shown in FIG. 47D, a +1 C•G-to-A•T transversion edit at RNF2 as shown in FIG. 47E, a +1 G•C-to-C•G transversion edit at EMX1 as shown in FIG. 47F, a +2 T•A-to-A•T transversion edit at HBB as shown in FIG. 47G, and a +1 G•C-to-C•G transversion edit at FANCF as shown in FIG. 47H. FIGS. 47I-47N show a comparison of four prime editor constructs containing M-MLV variants for their ability to install the edits shown in FIGS. 47C-47H in a second round of independent experiments. FIGS. 470-47S show PE2 editing efficiency at five genomic loci with varying PBS lengths. FIG. 470 shows a +1 T•A-to-A•T variation at HEK3. FIG. 47P shows a +5 G•C-to-T•A variation at EMX1. FIG. 47Q shows a +5 G•C-to-T•A variation at FANCF. FIG. 47R shows a +1 C•G-to-A•T variation at RNF2. FIG. 47S shows a +2 G•C-to-T•A variation at HEK4. Values and error bars reflect the mean and s.d. of three independent biological replicates.

[0157] FIGS. 48A-48C show design features of PEgRNA PBS and RT template sequences. FIG. 48A shows PE2-mediated +5 G•C-to-T•A transversion editing efficiency (blue line) at VEGFA in HEK293T cells as a function of RT template length. Indels (gray line) are plotted for comparison. The sequence below the graph shows the last nucleotide templated for synthesis by the PEgRNA. G nucleotides (templated by a C in the PEgRNA) are highlighted; RT templates that end in C should be avoided during PEgRNA design to maximize prime editing efficiencies. FIG. 48B shows +5 G•C-to-T•A transversion editing and indels for DNMT1 as in FIG. 48A. FIG. 48C shows +5 G•C-to-T•A transversion editing and indels for RUNX1 as in FIG. 48A. Values and error bars reflect the mean and s.d. of three independent biological replicates.

[0158] FIGS. 49A-49B show the effects of PE2, PE2 R110S K103L, Cas9 H840A nickase, and dCas9 on cell viability. HEK293T cells were transfected with plasmids encoding PE2, PE2 R110S K103L, Cas9 H840A nickase, or dCas9, together with a HEK3-targeting PEgRNA plasmid. Cell viability was measured every 24 hours post-transfection for 3 days using the CellTiter-Glo 2.0 assay (Promega). FIG. 49A shows viability, as measured by luminescence, at 1, 2, or 3 days post-transfection. Values and error bars reflect the mean and s.e.m. of three independent biological replicates each performed in technical triplicate. FIG. 49B shows percent editing and indels for PE2, PE2 R110S K103L, Cas9 H840A nickase, or dCas9, together with a HEK3-targeting PEgRNA plasmid that encodes a +5 G to A edit. Editing efficiencies were measured on day 3 post-transfection from cells treated alongside of those used for assaying viability in FIG. 49A. Values and error bars reflect the mean and s.d. of three independent biological replicates.

[0159] FIGS. 50A-50B show PE3-mediated HBB E6V correction and HEXA 1278+TATC correction by various PEgRNAs. FIG. 50A shows a screen of 14 PEgRNAs for correction of the HBB E6V allele in HEK293T cells with PE3. All PEgRNAs evaluated convert the HBB E6V allele back to wild-type HBB without the introduction of any silent PAM mutation. FIG. 50B shows a screen of 41 PEgRNAs for correction of the HEXA 1278+TATC allele in HEK293T cells with PE3 or PE3b. Those PEgRNAs labeled HEXAs correct the pathogenic allele by a shifted 4-bp deletion that disrupts the PAM and leaves a silent mutation. Those PEgRNAs labeled HEXA correct the pathogenic allele back to wild-type. Entries ending in “b” use an edit-specific nicking sgRNA in combination with the PEgRNA (the PE3b system). Values and error bars reflect the mean and s.d. of three independent biological replicates.

[0160] FIGS. 51A-51G show a PE3 activity in human cell lines and a comparison of PE3 and Cas9-initiated HDR. Efficiency of generating the correct edit (without indels) and indel frequency for PE3 and Cas9-initiated HDR in HEK293T cells as shown in FIG. 51A, K562 cells as shown in FIG. 51B, U2OS cells as shown in FIG. 51C, and HeLa cells as shown in FIG. 51D. Each bracketed editing comparison installs identical edits with PE3 and Cas9-initiated HDR. Non-targeting controls are PE3 and a PEgRNA that targets a non-target locus. FIG. 51E shows control experiments with non-targeting PEgRNA+PE3, and with dCas9+sgRNA, compared with wild-type Cas9 HDR experiments confirming that ssDNA donor HDR template, a common contaminant that artificially elevates apparent HDR efficiencies, does not contribute to the HDR measurements in FIGS. 51A-51D. FIGS. 51F-51G show example HEK3 site allele tables from genomic DNA samples isolated from K562 cells after editing with PE3 or with Cas9-initiated HDR. Alleles were sequenced on an Illumina MiSeq and analyzed with CRISPResso2¹⁷⁸. The reference HEK3 sequence from this region is at the top. Allele tables are shown for a non-targeting PEgRNA negative control, a +1 CTT insertion at HEK3 using PE3, and a +1 CTT insertion at HEK3 using Cas9-initiated HDR. Allele frequencies and corresponding Illumina sequencing read counts are shown for each allele. All alleles observed with frequency ≥0.20% are shown. Values and error bars reflect the mean and s.d. of three independent biological replicates.

[0161] FIGS. 52A-52D show distribution by length of pathogenic insertions, duplications, deletions, and indels in the ClinVar database. The ClinVar variant summary was downloaded from NCBI Jul. 15, 2019. The lengths of reported insertions, deletions, and duplications were calculated using reference and alternate alleles, variant start and stop positions, or appropriate identifying information in the variant name. Variants that did not report any of the above information were excluded from the analysis. The lengths of reported indels (single variants that include both insertions and deletions relative to the reference genome) were calculated by determining the number of mismatches or gaps in the best pairwise alignment between the reference and alternate alleles.

[0162] FIGS. 53A-53E show FACS gating examples for GFP-positive cell sorting. Below are examples of original batch analysis files outlining the sorting strategy used for generating HEXA 1278+TATC and HBB E6V HEK293T cell lines. The image data was generated on a Sony LE-MA900 cytometer using Cell Sorter Software v. 3.0.5. Graphic 1 shows gating plots for cells that do not express GFP. Graphic 2 shows an example sort of P2A—GFP-expressing cells used for isolating the HBB E6V HEK293T cell lines. HEK293T cells were initially gated on population using FSC-A/BSC-A (Gate A), then sorted for singlets using FSC-A/FSC-H (Gate B). Live cells were sorted for by gating DAPI-negative cells (Gate C). Cells with GFP fluorescence levels that were above those of the negative-control cells were sorted for using EGFP as the fluorochrome (Gate D). FIG. 53A shows HEK293T cells (GFP-negative). FIG. 53B shows a representative plot of FACS gating for cells expressing PE2—P2A—GFP. FIG. 53C shows the genotypes for HEXA 1278+TATC homozygote HEK293T cells. FIGS. 53D-53E show allele tables for HBB E6V homozygote HEK293T cell lines.

[0163] FIG. 54 is a schematic which summarizes the PEgRNA cloning procedure.

[0164] FIGS. 55A-55G are schematics of PEgRNA designs. FIG. 55A shows a simple diagram of PEgRNA with domains labeled (left) and bound to nCas9 at a genomic site (right). FIG. 55B shows various types of modifications to PEgRNA which are anticipated to increase activity. FIG. 55C shows modifications to PEgRNA to increase transcription of longer RNAs via promoter choice and 5′, 3′ processing and termination. FIG. 55D shows the lengthening of the P1 system, which is an example of a scaffold modification. FIG. 55E shows that the incorporation of synthetic modifications within the template region, or elsewhere within the PEgRNA, could increase activity. FIG. 55F shows that a designed incorporation of minimal secondary structure within the template could prevent formation of longer, more inhibitory, secondary structure. FIG. 55G shows a split PEgRNA with a second template sequence anchored by an RNA element at the 3′ end of the PEgRNA (left). Incorporation of elements at the 5′ or 3′ ends of the PEgRNA could enhance RT binding.

[0165] FIGS. 56A-56D show the incorporation of PEgRNA scaffold sequence into target loci. HTS data were analyzed for PEgRNA scaffold sequence insertion as described in FIGS. 60A-60B. FIG. 56A shows an analysis for the EMX1 locus. Shown is the % of total sequencing reads containing one or more PEgRNA scaffold sequence nucleotides within an insertion adjacent to the RT template (left); the percentage of total sequencing reads containing a PEgRNA scaffold sequence insertion of the specified length (middle); and the cumulative total percentage of PEgRNA insertion up to and including the length specified on the X axis. FIG. 56B shows the same as FIG. 56A, but for FANCF. FIG. 56C shows the same as in FIG. 56A but for HEK3. FIG. 56D shows the same as FIG. 56A but for RNF2. Values and error bars reflect the mean and s.d. of three independent biological replicates.

[0166] FIGS. 57A-57I show the effects of PE2, PE2-dRT, and Cas9 H840A nickase on transcriptome-wide RNA abundance. Analysis of cellular RNA, depleted for ribosomal RNA, isolated from HEK293T cells expressing PE2, PE2-dRT, or Cas9 H840A nickase and a PRNP-targeting or HEXA-targeting PEgRNA. RNAs corresponding to 14,410 genes and 14,368 genes were detected in PRNP and HEXA samples, respectively. FIGS. 57A-57F show Volcano plot displaying the -log10 FDR-adjusted p-value vs. log2-fold change in transcript abundance for Aeach RNA, comparing (FIG. 57A) PE2 vs. PE2-dRT with PRNP-targeting PEgRNA, (FIG. 57B) PE2 vs. Cas9 H840A with PRNP-targeting PEgRNA, (FIG. 57C) PE2-dRT vs. Cas9 H840A with PRNP-targeting PEgRNA, (FIG. 57D) PE2 vs. PE2-dRT with HEXA-targeting PEgRNA, (FIG. 57E) PE2 vs. Cas9 H840A with HEXA-targeting PEgRNA, (FIG. 57F) PE2-dRT vs. Cas9 H840A with HEXA-targeting PEgRNA. Red dots indicate genes that show >2-fold change in relative abundance that are statistically significant (FDR-adjusted p<0.05). FIGS. 57G-57I are Venn diagrams of upregulated and downregulated transcripts (≥2-fold change) comparing PRNP and HEXA samples for (FIG. 57G) PE2 vs PE2-dRT, (FIG. 57H) PE2 vs. Cas9 H840A, and (FIG. 57I) PE2-dRT vs. Cas9 H840A.

[0167] FIGS. 58A-58B showrepresentative FACS gating for neuronal nuclei sorting. Nuclei were sequentially gated on the basis of DyeCycle Ruby signal, FSC/SSC ratio, SSC-Width/SSC-height ratio, and GFP/DyeCycle ratio.

[0168] FIGS. 59A-59G show the protocol for cloning 3′-extended PEgRNAs into mammalian U6 expression vectors by Golden Gate assembly. FIG. 59A shows the cloning overview. FIG. 59B shows ‘Step 1: Digest pU6-PEgRNA-GG-Vector plasmid (component 1)’. FIG. 59C shows ‘Steps 2 and 3: Order and anneal oligonucleotide parts (components 2, 3, and 4)’. FIG. 59D shows ‘Step 2.b.ii.: sgRNA scaffold phosphorylation (unnecessary if oligonucleotides were purchased phosphorylated)’. FIG. 59E shows ‘Step 4: PEgRNA assembly’. FIG. 59F shows ‘Steps 5 and 6: Transformation of assembled plasmids’. FIG. 59G shows a diagram summarizing the PEgRNA cloning protocol.

[0169] FIGS. 60A-60B show the Python script for quantifying PEgRNA scaffold integration. A custom python script was generated to characterize and quantify PEgRNA insertions at target genomic loci. The script iteratively matches text strings of increasing length taken from a reference sequence (guide RNA scaffold sequence) to the sequencing reads within fastq files, and counts the number of sequencing reads that match the search query. Each successive text string corresponds to an additional nucleotide of the guide RNA scaffold sequence. Exact length integrations and cumulative integrations up to a specified length were calculated in this manner. At the start of the reference sequence, 5 to 6 bases of the 3′ end of the new DNA strand synthesized by the reverse transcriptase are included to ensure alignment and accurate counting of short slices of the sgRNA.

[0170] FIG. 61 is a graph showing the percent of total sequencing reads with the specified edit for SaCas9(N580A)-MMLV RT HEK3+6 C>A. The values for the correct edits as well as indels are shown.

[0171] FIGS. 62A-62B show the importance of the protospacer for efficient installation of a desired edit at a precise location with prime editing. FIG. 62A is a graph showing the percent of total sequencing reads with target TA base pairs converted to AT for various HEK3 loci. FIG. 62B is a sequence analysis showing the same.

[0172] FIG. 63 is a graph showing SpCas9 PAM variants in PAM editing (N=3). The percent of total sequencing reads with the targeted PAM edit is shown for SpCas9(H840A)-VRQR-MMLV RT, where NGA>NTA, and for SpCas9(H840A)-VRER-MMLV RT, where NGCG>NTCG. The PEgRNA primer binding site (PBS) length, RT template (RT) length, and PE system used are listed.

[0173] FIGS. 64A-64F depict a schematic showing the introduction of various site-specific recombinase (SSR) targets into the genome using PE. FIG. 64A provides a general schematic of the insertion of a recombinase target sequence by a prime editor. FIG. 64B shows how a single SSR target inserted by PE can be used as a site for genomic integration of a DNA donor template. FIG. 64C shows how a tandem insertion of SSR target sites can be used to delete a portion of the genome. FIG. 64D shows how a tandem insertion of SSR target sites can be used to invert a portion of the genome. FIG. 64E shows how the insertion of two SSR target sites at two distal chromosomal regions can result in chromosomal translocation. FIG. 64F shows how the insertion of two different SSR target sites in the genome can be used to exchange a cassette from a DNA donor template.

[0174] FIG. 65 shows in 1) the PE-mediated synthesis of a SSR target site in a human cell genome and 2) the use of that SSR target site to integrate a DNA donor template comprising a GFP expression marker. Once successfully integrated, the GFP causes the cell to fluoresce.

[0175] FIG. 66 depicts one embodiment of a prime editor being provided as two PE half proteins which regenerate as whole prime editor through the self-splicing action of the split-intein halves located at the end or beginning of each of the prime editor half proteins.

[0176] FIGS. 67A-67B depict the mechanism of intein removal from a polypeptide sequence and the reformation of a peptide bond between the N-terminal and the C-terminal extein sequences. FIG. 67A depicts the general mechanism of two half proteins each containing half of an intein sequence, which when in contact within a cell result in a fully-functional intein which then undergoes self-spicing and excision. The process of excision results in the formation of a peptide bond between the N-terminal protein half (or the “N extein”) and the C-terminal protein half (or the “C extein”) to form a whole, single polypeptide comprising the N extein and the C extein portions. In various embodiments, the N extein may correspond to the N-terminal half of a split prime editor fusion protein and the C extein may correspond to the C-terminal half of a split prime editor. (b) shows a chemical mechanism of intein excision and the reformation of a peptide bond that joins the N extein half (the red-colored half) and the C extein half (the blue-colored half). Excision of the split inteins (i.e., the N intein and the C intein in the split intein configuration) may also be referred to as “trans splicing” as it involves the splicing action of two separate components provided in trans.

[0177] FIG. 68A demonstrates that delivery of both split intein halves of SpPE (SEQ ID NOs: 3875, 3876) at the linker maintains activity at three test loci when co-transfected into HEK293T cells.

[0178] FIG. 68B demonstrates that delivery of both split intein halves of SaPE2 (e.g., SEQ ID NO: 443 and SEQ ID NO: 450) recapitulate activity of full length SaPE2 (SEQ ID NO: 134) when co-transfected into HEK293T cells. Residues indicated in quotes are the sequence of amino acids 741-743 in SaCas9 (first residues of the C-terminal extein) which are important for the intein trans splicing reaction. ‘SMP’ are the native residues, which we also mutated to the ‘CFN’ consensus splicing sequence. The consensus sequence is shown to yield the highest reconstitution as measured by prime editing percentage.

[0179] FIG. 68C provides data showing that various disclosed PE ribonucleoprotein complexes (PE2 at high concentration, PE3 at high concentration and PE3 at low concentration) can be delivered in this manner

[0180] FIG. 69 shows a bacteriophage plaque assay to determine PE effectiveness in PANCE. Plaques (dark circles) indicate phage able to successfully infect E. coli. Increasing concentration of L-rhamnose results in increased expression of PE and an increase in plaque formation. Sequencing of plaques revealed the presence of the PE-installed genomic edit.

[0181] FIGS. 70A-70I provide an example of an edited target sequence as an illustration of a step-by-step instruction for designing PEgRNAs and nicking-sgRNAs for prime editing. FIG. 70A: Step 1. Define the target sequence and the edit. Retrieve the sequence of the target DNA region (-200bp) centered around the location of the desired edit (point mutation, insertion, deletion, or combination thereof). FIG. 70B: Step 2. Locate target PAMs. Identify PAMs in proximity to the edit location. Be sure to look for PAMs on both strands. While PAMs close to the edit position are preferred, it is possible to install edits using protospacers and PAMs that place the nick>30 nt from the edit position. FIG. 70C: Step 3. Locate the nick sites. For each PAM being considered, identify the corresponding nick site. For Sp Cas9 H840A nickase, cleavage occurs in the PAM-containing strand between the 3^{rd} and 4^{th} bases 5′ to the NGG PAM. All edited nucleotides must exist 3′ of the nick site, so appropriate PAMs must place the nick 5′ to the target edit on the PAM-containing strand. In the example shown below, there are two possible PAMs. For simplicity, the remaining steps will demonstrate the design of a PEgRNA using PAM 1 only. FIG. 70D: Step 4. Design the spacer sequence. The protospacer of Sp Cas9 corresponds to the 20 nucleotides 5′ to the NGG PAM on the PAM-containing strand. Efficient Pol III transcription initiation requires a G to be the first transcribed nucleotide. If the first nucleotide of the protospacer is a G, the spacer sequence for the PEgRNA is simply the protospacer sequence. If the first nucleotide of the protospacer is not a G, the spacer sequence of the PEgRNA is G followed by the protospacer sequence. FIG. 70E: Step 5. Design a primer binding site (PBS). Using the starting allele sequence, identify the DNA primer on the PAM-containing strand. The 3′ end of the DNA primer is the nucleotide just upstream of the nick site (i.e. the 4^{th} base 5′ to the NGG PAM for Sp Cas9). As a general design principle for use with PE2 and PE3, a PEgRNA primer binding site (PBS) containing 12 to 13 nucleotides of complementarity to the DNA primer can be used for sequences that contain ˜40-60% GC content. For sequences with low GC content, longer (14- to 15-nt) PBSs should be tested. For sequences with higher GC content, shorter (8- to 11-nt) PBSs should be tested. Optimal PBS sequences should be determined empirically, regardless of GC content. To design a length-p PBS sequence, take the reverse complement of the first p nucleotides 5′ of the nick site in the PAM-containing strand using the starting allele sequence. FIG. 70F: Step 6. Design an RT template. The RT template encodes the designed edit and homology to the sequence adjacent to the edit. Optimal RT template lengths vary based on the target site. For short-range edits (positions +1 to +6), it is recommended to test a short (9 to 12 nt), a medium (13 to 16 nt), and a long (17 to 20 nt) RT template. For long-range edits (positions +7 and beyond), it is recommended to use RT templates that extend at least 5 nt (preferably 10 or more nt) past the position of the edit to allow for sufficient 3′ DNA flap homology. For long-range edits, several RT templates should be screened to identify functional designs. For larger insertions and deletions (>5 nt), incorporation of greater 3′ homology (˜20 nt or more) into the RT template is recommended. Editing efficiency is typically impaired when the RT template encodes the synthesis of a G as the last nucleotide in the reverse transcribed DNA product (corresponding to a C in the RT template of the PEgRNA). As many RT templates support efficient prime editing, avoidance of G as the final synthesized nucleotide is recommended when designing RT templates. To design a length-r RT template sequence, use the desired allele sequence and take the reverse complement of the first r nucleotides 3′ of the nick site in the strand that originally contained the PAM. Note that compared to SNP edits, insertion or deletion edits using RT templates of the same length will not contain identical homology. FIG. 70G: Step 7. Assemble the full PEgRNA sequence. Concatenate the PEgRNA components in the following order (5′ to 3′): spacer, scaffold, RT template and PBS. FIG. 70H: Step 8. Designing nicking-sgRNAs for PE3. Identify PAMs on the non-edited strand upstream and downstream of the edit. Optimal nicking positions are highly locus-dependent and should be determined empirically. In general, nicks placed 40 to 90 nucleotides 5′ to the position across from the PEgRNA-induced nick lead to higher editing yields and fewer indels. A nicking sgRNA has a spacer sequence that matches the 20-nt protospacer in the starting allele, with the addition of a 5′-G if the protospacer does not begin with a G. FIG. 70I: Step 9. Designing PE3b nicking-sgRNAs. If a PAM exists in the complementary strand and its corresponding protospacer overlaps with the sequence targeted for editing, this edit could be a candidate for the PE3b system. In the PE3b system, the spacer sequence of the nicking-sgRNA matches the sequence of the desired edited allele, but not the starting allele. The PE3b system operates efficiently when the edited nucleotide(s) falls within the seed region (˜10 nt adjacent to the PAM) of the nicking-sgRNA protospacer. This prevents nicking of the complementary strand until after installation of the edited strand, preventing competition between the PEgRNA and the sgRNA for binding the target DNA. PE3b also avoids the generation of simultaneous nicks on both strands, thus reducing indel formation significantly while maintaining high editing efficiency. PE3b sgRNAs should have a spacer sequence that matches the 20-nt protospacer in the desired allele, with the addition of a 5′ G if needed.

[0182] FIG. 71A shows the nucleotide sequence of a SpCas9 PEgRNA molecule (top) which terminates at the 3′ end in a “UUU” and does not contain a toeloop element. The lower portion of the figure depicts the same SpCas9 PEgRNA molecule but is further modified to contain a toeloop element having the sequence 5′-“GAAANNNNN”-3′ inserted immediately before the “UUU” 3′ end. The “N” can be any nucleobase.

[0183] FIG. 71B demonstrates that the efficiency of prime editing in HEK cells or EMX cells is increased using PEgRNA containing toeloop elements, whereas the percent of indel formation is largely unchanged.

[0184] FIGS. 72A-72C depict alternative PEgRNA configurations that can be used in prime editing. FIG. 72A depicts the PE2:PEgRNA embodiment of prime editing. This embodiment involves a PE2 (a fusion protein comprising a Cas9 and a reverse transcriptase) complexed with a PEgRNA (as also described in FIGS. 1A-1I and/or FIGS. 3A-3E). In this embodiment, the template for reverse transcription is incorporated into a 3′ extension arm on the sgRNA to make the PEgRNA, and the DNA polymerase enzyme is a reverse transcriptase (RT) fused directly to Cas9. FIG. 72B depict the MS2cp-PE2:sgRNA+tPERT embodiment. This embodiment comprises a PE2 fusion (Cas9+a reverse transcriptase) that is further fused to the MS2 bacteriophage coat protein (MS2cp) to form the MS2cp-PE2 fusion protein. To achieve prime editing, the MS2cp-PE2 fusion protein is complexed with an sgRNA that targets the complex to a specific target site in the DNA. The embodiment then involves the introduction of a trans prime editing RNA template (“tPERT”), which operates in place of a PEgRNA by providing a primer binding site (PBS) and an DNA synthesis template on separate molecule, i.e., the tPERT, which is also equipped with a MS2 aptamer (stem loop). The MS2cp protein recruits the tPERT by binding to the MS2 aptamer of the molecule. FIG. 72C depict alternative designs for PEgRNAs that can be achieved through known methods for chemical synthesis of nucleic acid molecules. For example, chemical synthesis can be used to synthesize a hybrid RNA/DNA PEgRNA molecule for use in prime editing, wherein the extension arm of the hybrid PEgRNA is DNA instead of RNA. In such an embodiment, a DNA-dependent DNA polymerase can be used in place of a reverse transcriptase to synthesize the 3′ DNA flap comprising the desired genetic change that is formed by prime editing. In another embodiment, the extension arm can be synthesized to include a chemical linker that prevents the DNA polymerase (e.g., a reverse transcriptase) from using the sgRNA scaffold or backbone as a template. In still another embodiment, the extension arm may comprise a DNA synthesis template that has the reverse orientation relative to the overall orientation of the PEgRNA molecule. For example, and as shown for a PEgRNA in the 5′-to-3′ orientation and with an extension attached to the 3′ end of the sgRNA scaffold, the DNA synthesis template is orientated in the opposite direction, i.e., the 3′-to-5′ direction. This embodiment may be advantageous for PEgRNA embodiments with extension arms positioned at the 3′ end of a gRNA. By reverse the orientation of the extension arm, the DNA synthesis by the polymerase (e.g., reverse transcriptase) will terminate once it reaches the newly orientated 5′ of the extension arm and will thus, not risk using the gRNA core as a template.

[0185] FIG. 73 demonstrates prime editing with tPERTs and the MS2 recruitment system (aka MS2 tagging technique). An sgRNA targeting the prime editor protein (PE2) to the target locus is expressed in combination with a tPERT containing a primer binding site (a13-nt or 17-nt PBS), an RT template encoding a His6 tag insertion and a homology arm, and an MS2 aptamer (located at the 5′ or 3′ end of the tPERT molecule). Either prime editor protein (PE2) or a fusion of the MS2cp to the N-terminus of PE2 was used. Editing was carried out with or without a complementary-strand nicking sgRNA, as in the previously developed PE3 system (designated in the x-axis as labels “PE2+nick” or “PE2”, respectively). This is also referred to and defined herein as “second-strand nicking.”

[0186] FIG. 74 demonstrates that the MS2 aptamer expression of the reverse transcriptase in trans and its recruitment with the MS2 aptamer system. The PEgRNAPEgRNA contains the MS2 RNA aptamer inserted into either one of two sgRNA scaffold hairpins. The wild-type M-MLV reverse transcriptase is expressed as an N-terminal or C-terminal fusion to the MS2 coat protein (MCP). Editing is at the HEK3 site in HEK293T cells.

[0187] FIG. 75 provides a bar graph comparing the efficiency (i.e., “% of total sequencing reads with the specified edit or indels”) of PE2, PE2-trunc, PE3, and PE3-trunc over different target sites in various cell lines. The data shows that the prime editors comprising the truncated RT variants were about as efficient as the prime editors comprising the non-truncated RT proteins.

[0188] FIG. 76 demonstrates the editing efficiency of intein-split prime editors. HEK239T cells were transfected with plasmids encoding full-length PE2 or intein-split PE2, PEgRNA and nicking guide RNA. Consensus sequence (most amino-terminal residues of C terminal extein) are indicated. Percent editing at two sites in shown: HEK3+1 CTT insertion and PRNP +6 G to T. Replicate n=3 independent transfections.

[0189] FIG. 77 demonstrates the editing efficiency of intein-split prime editors. Editing assessed by targeted deep sequencing in bulk cortex and GFP+subpopulation upon delivery of 5E10vg per SpPE3 half and a small amount 1E10 of nuclear-localized GFP:KASH to PO mice by ICV injection. Editors and GFP were packaged in AAV9 with EFS promoter. Mice were harvested three weeks post injection and GFP+nuclei were isolated by flow cytometry. Individual data points are shown, with 1-2 mice per condition analyzed.

[0190] FIG. 78 demonstrates the editing efficiency of intein-split prime editors. Specifically, the figures depicts AAV split-SpPE3 constructs. Co-transduction by AAV particles separately expressing SpPE3-N and SpPE3-C recapitulates PE3 activity. Note N-terminal genome contains a U6-sgRNA cassette expressing the nicking sgRNA, and the C-terminal genome contains a U6-PEgRNA cassette expressing the PEgRNA.

[0191] FIG. 79 shows the editing efficiency of certain optimized linkers. In particular, the data shows the editing efficiency of the PE2 construct with the current linker (noted as PE2—white box) compared to various versions with the linker replaced with a sequence as indicated at the HEK3, EMX1, FANCF, RNF2 loci for representative PEgRNAs for transition, transversion, insertion, and deletion edits. The replacement linkers are referred to as ““1× SGGS”(SEQ ID NO: 174), “2× SGGS”(SEQ ID NO: 446), “3× SGGS” (SEQ ID NO: 3889), “1× XTEN” (SEQ ID NO: 171), “no linker”, “1× Gly”, “1× Pro”, “1× EAAAK”(SEQ ID NO: 3968), “2× EAAAK” “(SEQ ID NO: 3969), and “3× EAAAK ” (SEQ ID NO: 3970). The editing efficiency is measured in bar graph format relative to the “control” editing efficiency of PE2. The linker of PE2 is SGGSSGGSSGSETPGTSESATPESSGGSSGGSS (SEQ ID NO: 127). All editing was done in the context of the PE3 system, i.e., which refers the PE2 editing construct plus the addition of the optimal secondary sgRNA nicking guide.

[0192] FIG. 80. Taking the average fold efficacy relative to PE2 yields the graph shown, indicating that use of a 1× XTEN (SEQ ID NO: 171) linker sequence improves editing efficiency by 1.14 fold on average (n=15).

[0193] FIG. 81 depicts the transcription level of PEgRNAs from different promoters.

[0194] FIG. 82 Depicts the impact of different types of modifications on PEgRNA structure on editing efficiency relative to unmodified PEgRNA.

[0195] FIG. 83 Depicts a PE experiment that targeted editing of the HEK3 gene, specifically targeting the insertion of a 10 nt insertion at position +1 relative to the nick site and using PE3.

[0196] FIG. 84A depicts an exemplary PEgRNA having a spacer, gRNA core, and an extension arm (RT template+primer binding site), which is modified at the 3′ end of the PEgRNA with a tRNA molecule, coupled through a UCU linker. The tRNA includes various post-transcriptional modifications. Said modification are not required, however.

[0197] FIG. 84B depicts structure of tRNA that can be used to modify PEgRNA structures. The P1 can be variable in length. The P1 can be extended to help prevent RNAseP processing of the PEgRNA-tRNA fusion.

[0198] FIG. 85 depicts a PE experiment that targeted editing of the FANCF gene, specifically targeting a G-to-T conversion at position +5 relative to the nick site and using PE3 construct.

[0199] FIG. 86 depicts a PE experiment that targeted editing of the HEK3 gene, specifically targeting the insertion of a 71 nt FLAG tag insertion at position +1 relative to the nick site and using PE3 construct.

[0200] FIG. 87 results from a screen in N2A cells where the pegRNA installs 1412Adel, with details about the primer binding site (PBS) length and reverse transcriptase (RT) template length. (Shown with and without indels).

[0201] FIG. 88 results from a screen in N2A cells where the pegRNA installs 1412Adel, with details about the primer binding site (PBS) length and reverse transcriptase (RT) template length. (Shown with and without indels).

[0202] FIG. 89 depicts results of editing at a proxy locus in the β-globin gene and at HEK3 in healthy HSCs, varying the concentration of editor to pegRNA and nicking gRNA.

[0203] FIG. 90 provides a schematic of an embodiment of dual-flap prime editing. A DNA target sequence is acted upon by two prime editing complexes (guided by pegRNA-A and pegRNA-B). The two pegRNAs target opposite strands of the double helix. Each prime editor (PE2pegRNA) nicks a single DNA strand, then synthesizes a 3′ DNA flap using the pegRNA as a template. The action of the two prime editor complexes results in the production of an intermediate containing two 3′ flaps on opposite strands of the DNA. The two 3′ flaps are complementarity to one another at their 3′ ends. Annealing of the 3′ ends of the 3′ flaps results in the formation of a double-duplex structure, with one duplex made of paired 3′ flaps containing the new DNA sequence (red), and the other duplex made of paired 5′ flaps containing the original DNA sequence (black). Excision of the intervening original DNA duplex (black paired 5′ flaps) yields a double-nicked DNA species containing the desired new DNA sequence (red) having replaced the original DNA sequence. Ligation of both nicks completes the editing process.

[0204] FIGS. 91A-91B provide results from Example 7. FIG. 91A shows Crispresso2 output allele table (aligned for desired product) for the replacement of a 90-bp sequence with a new 22-bp sequence at the HEK3 site in HEK293T cells using dual prime editors. The desired product accounts for over 80% of the sequencing reads. The reference starting allele is shown above the sequenced alleles, for comparison. FIG. 91B showsSequences of pegRNAs used to achieve the sequence replacement shown in FIG. 91A. pegRNA1 and pegRNA 2 target different strands of the DNA double helix, and generate 5′ displaced nicks as drawn in FIG. 90.

[0205] FIG. 92 shows design embodiments of pegRNA designs for dual-flap prime editing. Two pegRNAs are used for dual-flap prime editing, shown in the drawing as pegRNA A and pegRNA B. Each pegRNA contains a spacer sequence (dark blue) that guides the prime editing complex to the target DNA site. The two pegRNAs target opposite strands of the DNA double helix. Like other pegRNAs, dual-flap prime editing pegRNAs contain a 3′ extension with a primer binding sequence (PBS, green) that anneals to the nicked genomic DNA strand to initiate reverse transcription, and a reverse transcription template (RT template, light blue) that templates the synthesis of new DNA by the reverse transcriptase enzyme. Unlike pegRNAs used for classic prime editing, which require the newly synthesized edited 3′ flap to compete with the endogenous 5′ flap, there is no need to encode homology to the target site within the RT template. Instead, the 3′ ends of the two synthesized 3′ flaps need only contain complementarity to each other (i.e. the 3′ ends of the 3′ flaps are the reverse complement sequences of one another). This complementarity allows the two 3′ flaps to anneal and promote the formation of the desired edited DNA sequence.

[0206] FIGS. 93A-93B show the results of Example 7 of using dual prime editing to install Bxb1 attB and attP sites with dual-flap prime editing. FIG. 93A shows the installation of a 38-bp Bxb1 attB site at HEK3. Six pegRNAs were constructed, three targeting the (+) strand (A1, A2 and A3) and three targeting the (−) strand (B1, B2 and B3). These differ in the amounts of attB sequence encoded in the RT template, leading to a different number of complementary nucleotides between the two flaps. The 3×3 matrix of pegRNAs was evaluated for installation of the attB sequence at the target genomic location in HEK293T cells. FIG. 93A andFIG. 93B show the installation of a 50-bp Bxb1 attP site at HEK3. Six pegRNAs were constructed, three targeting the (+) strand (A1, A2 and A3) and three targeting the (−) strand (B1, B2 and B3). These differ in the amounts of attP sequence encoded in the RT template, leading to a different number of complementary nucleotides between the two flaps. The 3×3 matrix of pegRNAs was evaluated for installation of the attP sequence at the target genomic location in HEK293T cells. For both edits in FIG. 93A and FIG. 93B, the installation of the attB or attP site occurs with concomitant deletion of the 90-bp of genomic DNA sequence located between the two nick sites.

[0207] FIG. 94 shows the results of installation of Bxb1 attB and attP sites at human safe-harbor loci with dual-flap prime editing. Installation of Bxb1 attP sites at the AAVS1 locus (left) or Bxb1 attB sites at the CCRS locus (right) in HEK293T cells. Correct edits are shown in blue (AAVS1) and red (CCRS), while indel byproducts are shown in gray.

[0208] FIG. 95 provides a schematic of genomic sequence inversion with quadruple-flap prime editing. A region of genomic DNA is targeted for inversion (green and orange segment). Four pegRNAs are delivered to cells with the PE2 prime editor. One pair of pegRNAs targets a single genomic DNA strand and templates the synthesis of two complementary DNA flaps (A and A′, blue), while the second pair targets the other genomic DNA strand and templates the synthesis of two complementary DNA flaps with an orthogonal DNA sequence (B and B′, pink). The complementary flaps anneal to form 3′ overhang duplexes. The 5′ overhang duplexes are excised by endogenous cellular repair enzymes. Nicks are ligated to produce the product allele containing an inverted DNA sequence (green and orange segments) and the pegRNA-templated sequences at the inversion junctions (blue and pink segments).

[0209] FIG. 96 shows the results of amplicon sequencing of AAVS1 inversion junctions. CRISPResso2 analysis output of a 2.7-kb inversion at the AAVS1 locus in HEK293T cells using the quadruple-flap primed editing strategy. PCR amplification and sequencing of the expected inversion junctions showed the desired products with Bxb1 attP or attB sequences inserted at the junctions of the inversion.

[0210] FIGS. 97A-97B show the results of targeted integration of a circular DNA plasmid into the genome using quadruple-flap prime editing. (FIG. 97A) A region of genomic DNA and a region of plasmid DNA are targeted for quadruple flap prime editing integration. Four pegRNAs are delivered to cells with the PE2 prime editor. Two pegRNAs template complementary sequences, one targeting a single genomic DNA strand, and the other targeting a single plasmid DNA strand (generating blue flaps). The other two pegRNAs target opposite genomic DNA and plasmid DNA strands from those of the first two pegRNAs, and they template the synthesis of two complementary DNA flaps (pink) that are orthogonal to the first pair. The complementary flaps anneal to form 3′ overhang duplexes. The 5′ overhang duplexes are excised by endogenous cellular repair enzymes. Nicks are ligated to produce the product allele containing an integrated plasmid DNA sequence (green and orange segments) and the pegRNA-templated sequences at the integration junctions (blue and pink segments). (FIG. 97B) CRISPResso2 analysis of amplicon sequencing of anticipated junction, showing plasmid backbone and genomic DNA sequence bridged by the pegRNA-templated attP sequence.

[0211] FIGS. 98A-98B show the results of targeted chromosomal translocation with quadruple-flap prime editing. (FIG. 98A) pegRNAs target two regions on different chromosomes. Complementary 3′ DNA flaps bridge the two chromosome sequences and direct the orientation of the translocation. (FIG. 98B) Targeted translocation between MYC and TIMM44 loci in HEK239T cells. CRISPResso2 analysis output from amplicon sequencing of the expected junctions from translocation between the MYC locus on chromosome 8 and the TIMM44 locus on chromosome 19. The majority of sequencing reads correspond to the desired allele sequence.

[0212] FIG. 99 shows installation of Bxb1 attB and attP sites with dual-flap prime editing at IDS locus. HEK293T cells were transfected with PE2 and different pairs of pegRNAs (e.g. in the first column pegRNA A1_a and pegRNA B2_a with templates for installing attP site in the forward direction). The efficiency was measured by HTS. This data shows that dual-flap editing can successfully insert the sequence of interest to the IDS locus with an efficiency up to ˜80%.

[0213] FIGS. 100A-100B describe dual-flap-mediated duplication. FIG. 100A is a schematic showing dual-flap-mediated duplication at AAVS1 locus in 293T cells. FIG. 100B shows results of using dual-flap pegRNA with PE2 for inducing duplication of genetic sequences at AAVS1.

[0214] FIG. 101 shows multi-flap induced new translocation MYC-CCRS. MYC-CCRS translocation was induced by quad-flap pegRNAs and PE2. MYC-CCRS translocation events were induced by quadruple-pegRNAs. Four different sets of pegRNAs were tested in HEK293T cells. The translocation junction products between derived chr8 and chr3 were amplified by junction primers. The % of reads aligned to the expected junction alleles are shown in the graph. The result shows that quadruple-flap can mediate translocation of MYC and CCR5 gene with product purity near 100% at junction 1 and ˜50% at junction 2. A representative allele plot shows the sequences aligned to the expected allele sequences at junction 1.

[0215] FIGS. 102A-102B show dual-flap and multi-flap editing in other human cell lines. FIG. 102A shows dual-flap editing in four different human cell lines. HEK293T and HeLa cells were transfected with dual pegRNAs and PE2 for editing three different genomic loci (IDS, MYC, and TIMM44). U2OS and K562 cells were nucleofected with the same components. Dual-flap has shown robust editing across all four human cells at the targeted loci, particularly at HEK293T and K562 cells. The cellular mechanism for enabling dual-flap editing are conserved across many human cell types. FIG. 102B shows multi-flap (quadruple-pegRNA) directed 2.7 kb inversion at the AAVS1 in HeLa cells.

[0216] FIG. 103A-103B shows results of inversion efficiency measurement by HTS at CCR5 locus. Percentage of the expected inversion edit allele was measured by HTS. Four quad-pegRNA sets PE2 were transfected in HEK293T cells, respectively. FIG. 103A shows dual-flap mediated sequence duplication (˜100nt) at CCR5 locus in HEK293T cells. The editing efficiency achieves ˜1.5% via HTS 300-cycle pair-end sequencing analysis. FIG. 103B shows quadruple-flap-mediated sequence inversion (˜95-117nt) at CCR5 locus in HeLa cells. The editing efficiency achieves ˜1.2% via HTS 300-cycle pair-end sequencing analysis. This result shows that multi-flap can successfully mediate duplication and inversion at CCR5 locus precisely. The editing specificity is high when the targeted sequence is duplicated (percentage of indels<2%).

[0217] FIGS. 104A-104E show targeted cellular repair pathway for dual-flap editing. In FIGS. 104A-104D, HEK293T cells were transfected with the plasmids that express Exo1, Fen1, Red Fluorescence Protein (control), DNA2, Mlh1 neg, and P53 inhibitor with pegRNA and PE2. The editing efficiency was measured by HTS. The editing efficiency was compared between the candidate and the RFP control. In FIG. 104E, HEK293T cells were transfected with the siRNA plasmids and pegRNA and PE2 for each target locus. Non-targeting siRNA (siNT) was used as the control. The editing efficiency was measured by HTS. The editing efficiency was compared between each siRNA knockdown and the siNT ctrl at each target locus. HEK293T cells were transfected with dual-pegRNAs, PE2, and the plasmids that express Exo1, Fen1, Red Fluorescence Protein (ctrl), DNA2, Mlh1 neg, and P53 inhibitor respectively. The editing efficiency was measured by HTS. The editing efficiency was compared between the candidate and the RFP ctrl. Two-tailed, paired Student t-test was used to measure statistical difference between each treatment and RFP control (P<0.05, *; P<0.01, **; P<0.001, ***). Overexpression of FEN1 improves dual flap editing efficiency in all four targeted loci (MYC, TIMM44, IDS, CCR5).

[0218] FIGS. 105A-105B show dual-flap-mediated sequence duplication at AAVS1 locus. FIG. 105A shows a schematic diagram of dual-flap-mediated sequence duplication at AAVS1 locus. FIG. 105B shows that by using dual pegRNAs that generate two unique 3′ flap structures, a ˜300 bp sequence duplication was induced at AAVS1 locus in 293T cells. Expected alleles are amplified with specific primers and are subjected for HTS. ˜94% reads are aligned to the expected alleles with duplication. Duplication products are not observed in the untreated samples.

[0219] FIG. 106 shows targeted IDS genomic sequence inversion with quadruple-flap prime editing. ˜13% of Hunter syndrome patients have been shown to have an inversion of the IDS gene sequences (Bondeson et al., Human Molecular Genetics, 1995). Quadruple-flap prime editing was applied to induce this pathogenic inversion of the ˜40kb IDS genomic sequence in the HEK293T cells. Six sets of quadruple pegRNAs were tested by transfecting HEK293T cells with the pegRNAs and PE2. Primers were used to specifically amplify the inverted sequences at junction “ab” and junction “cd”. ˜95% of the expected inverted allele sequences were observed at both junctions with IDS_QF1. Other sets of pegRNAs also yield high percentage of the expected allele sequences at both junctions. Inverted junction products are not observed in the untreated samples.

[0220] FIG. 107 shows that PegRNA 3′ motif modification improves dual-flap editing efficiency at IDS locus. To further improve the dual flap editing efficiency, a pseudoknot evoPreQ1 motif was introduced to protect the pegRNA 3′ end. By comparing the editing efficiency generated by the unmodified and evoPreQl-modified dual pegRNAs, there is an overall increase of the editing efficiency with modified pegRNAs at the targeted IDS locus. The improvement of dual-flap editing efficiency can reach up to 5.3-fold.

[0221] FIGS. 108A-108C show an overview of twinPE and twinPE-mediated sequence replacement. FIG. 108A shows that twinPE systems target genomic DNA sequences that contain two protospacer sequences on opposite strands of DNA. PE2pegRNA complexes target each protospacer, generate a single-stranded nick, and reverse transcribe the pegRNA-encoded template containing the desired insertion sequence. After synthesis and release of the 3′ DNA flaps, a hypothetical intermediate exists possessing annealed 3′ flaps containing the edited DNA sequence and annealed 5′ flaps containing the original DNA sequence. Excision of the original DNA sequence contained in the 5′ flap, follow by ligation of the 3′ flaps to the corresponding excision site, generates the desired edited product. FIG. 108B shows an example of twinPE-mediated replacement of a 90-bp sequence in HEK site 3 with a 38-bp Bxb1 attB sequence. FIG. 108C shows an evaluation of twinPE in HEK293T cells for the installation of the 38-bp Bxb1 attB site as shown in FIG. 108B or the 50-bp Bxb1 attP site at HEK site 3 using pegRNAs that template varying lengths of the insertion sequence. Values and error bars reflect the mean and s.d. of three independent biological replicates.

[0222] FIGS. 109A-109E show targeted sequence insertion, deletion, and recoding with twinPE in human cells. FIG. 109A shows insertion of FKBP coding sequence fragments with PE3 (12 bp, 36 bp, 108 bp, or 321 bp) or twinPE (108 bp) at HEK site 3 in HEK293T cells. FIG. 109B shows recoding of sequence within exons 4 and 7 in PAH in HEK293T cells using twinPE. A 64-bp target sequence in exon 4 was edited using 24, 36, or 59 bp of overlapping flaps, a 46-bp target sequence in exon 7 was edited using 22 or 42 bp of overlapping flaps, or a 64-bp sequence in exon 7 was edited using 24 or 47 bp of overlapping flaps. Editing activity was compared using standard pegRNAs or epegRNAs containing 3′ evoPreQ1 motifs. FIG. 109C is a schematic diagram of three distinct dual-flap deletion strategies that were investigated for carrying out targeted deletions. The “Basic-Anchor (BA)” twinPE strategy allows for flexible deletion starting at an arbitrary position 3′ of one nick site and ending at the other nick site. The “Hybrid-Anchor (HA)” twinPE strategy allows for flexible deletion of sequence at arbitrarily chosen positions between the two nick sites. The “PrimeDel (PD)” strategy tested here allows for deletion of the sequence starting at one nick site and ending at another nick site. FIG. 109D shows deletion of sequences at HEK site 3 in HEK293T cells using the BA-twinPE, HA-twinPE, or PD strategies targeting the same protospacer pair. Editing activity was compared using standard pegRNAs or epegRNAs containing 3′ evoPreQ1 motifs. FIG. 109E shows deletion of exon 51 sequence at the DMD locus in HEK293T cells using BA-twinPE, PD, paired Cas9 nuclease, or twinPE-mediated attB sequence replacement. Values and error bars reflect the mean and s.d. of three independent biological replicates. In the DMD exon 51 skipping experiment, at least two independent biological replicates were performed.

[0223] FIGS. 110A-110E show site-specific genomic integration of DNA cargo with twinPE and Bxbl recombinase in human cells. FIG. 110A shows screening of twinPE pegRNA pairs for installation of the Bxb1 attP sequence at the AAVS1 locus in HEK293T cells. FIG. 110B shows screening of twinPE pegRNA pairs for installation of the Bxb1 attB sequence at the CCR5 locus in HEK293T cells. FIG. 110C shows single transfection knock-in of 5.6-kb DNA donors using twinPE pegRNA pairs targeting CCR5 ( four left-most bars) or AAVS1 (three right-most bars). The twinPE pegRNAs install attB at CCR5 or attP at AA VS/. Bxb1 then integrates a donor bearing the corresponding attachment site into the genomic attachment site. FIG. 110D shows optimization of single transfection knock-in at CCR5 using the 531/584 twinPE pegRNA pair. Identity of the templated edit (attB vs. attP), identity of the central dinucleotide (wild-type GT vs. orthogonal mutant GA), and length of the overlap between flaps were varied to identify the combination that supported the highest knock-in efficiency. FIG. 110E shows insertion of the Bxb1 attB sequence within intron 1 of ALB in HEK293T and Huh7 cells lines. FIG. 110F shows a comparison of single transfection knock-in efficiencies at CCR5 and ALB in HEK293T and Huh7 cell lines.

[0224] FIGS. 111A-111E show site-specific genomic sequence inversion with twinPE and Bxb1 recombinase in human cells. FIG. 111A is a schematic diagram of recombination hot spots in IDS and IDS2 that lead to pathogenic 39-kb inversions, and the combined twinPE-Bxb1 strategy for installing or correcting the IDS inversion mutation. FIG. 111B shows a screen of pegRNA pairs at IDS and IDS2 for installation of attP or attB recombination site insertion at IDS and IDS2 loci with specific DNA targets. FIG. 111C shows a DNA sequencing analysis of the attP or attB insertion with sequential DNA transfection. FIG. 111D shows inversion product purity at the inverted junction 1 and junction 2 (sequential transfection), indicating the successful inversion at the two junctions. FIG. 111E shows the quantification of inversion efficiency at the junctions (sequential transfection and “one-pot” RNA nucleofection).

[0225] FIG. 112 shows the recoding of sequences within exon 10, 11, and 12 in PAH in HEK293T cells via twinPE. A 64-bp target sequence in exon 10 was edited using 28 bp of overlapping flaps, a 61-bp and 55-bp target sequence in exon 11 was edited using 25 bp of overlapping flaps, or a 68-bp and 58-bp sequence in exon 12 was edited using 27 and 24 bp of overlapping flaps, respectively. Values and error bars reflect the mean and s.d. of three independent biological replicates

[0226] FIG. 113 shows transfection of HEK293T clonal cell line containing homozygous attB site insertion with BxBI plasmids and attP-containing donor DNA plasmids. The knock-in efficiency is between 12-17% at the target site as measured by ddPCR.

[0227] FIG. 114 shows HTS measurement of expected junction sequences containing attL and attR recombination products after twinPE and BxBI-mediated one-pot knock-in. The product purities range from 71-95%. Values and error bars reflect the mean and s.d. of three independent biological replicates

[0228] FIG. 115A shows twinPE mediated attB insertion efficiency with reduced flap overlap length in the dual pegRNAs.

[0229] FIG. 115B shows PCR products amplified by specific primer for capturing the recombination between donor DNA and pegRNA plasmids shown on the agarose gel. Recombination between donor DNA and pegRNA plasmid was reduced with smaller flap overlap.

[0230] FIG. 116 is a schematic diagram of the developed PCR strategies for quantifying IDS inversion efficiency.

### DEFINITIONS

[0231] Unless defined otherwise, all technical and scientific terms used herein have the meaning commonly understood by a person skilled in the art to which this invention belongs. The following references provide one of skill with a general definition of many of the terms used in this invention: Singleton et al., Dictionary of Microbiology and Molecular Biology (2nd ed. 1994); The Cambridge Dictionary of Science and Technology (Walker ed., 1988); The Glossary of Genetics, 5th Ed., R. Rieger et al. (eds.), Springer Verlag (1991); and Hale & Marham, The Harper Collins Dictionary of Biology (1991). As used herein, the following terms have the meanings ascribed to them unless specified otherwise.

### Antisense Strand

[0232] In genetics, the “antisense” strand of a segment within double-stranded DNA is the template strand, and which is considered to run in the 3′ to 5′ orientation. By contrast, the “sense” strand is the segment within double-stranded DNA that runs from 5′ to 3′, and which is complementary to the antisense strand of DNA, or template strand, which runs from 3′ to 5′. In the case of a DNA segment that encodes a protein, the sense strand is the strand of DNA that has the same sequence as the mRNA, which takes the antisense strand as its template during transcription, and eventually undergoes (typically, not always) translation into a protein. The antisense strand is thus responsible for the RNA that is later translated to protein, while the sense strand possesses a nearly identical makeup to that of the mRNA. Note that for each segment of dsDNA, there will possibly be two sets of sense and antisense, depending on which direction one reads (since sense and antisense is relative to perspective). It is ultimately the gene product, or mRNA, that dictates which strand of one segment of dsDNA is referred to as sense or antisense.

### Bi-Specific Ligand

[0233] The term “bi-specific ligand” or “bi-specific moiety,” as used herein, refers to a ligand that binds to two different ligand-binding domains. In certain embodiments, the ligand is a small molecule compound, or a peptide, or a polypeptide. In other embodiments, ligand-binding domain is a “dimerization domain,” which can be install as a peptide tag onto a protein. In various embodiments, two proteins each comprising the same or different dimerization domains can be induced to dimerize through the binding of each dimerization domain to the bi-specific ligand. As used herein, “bi-specific ligands” may be equivalently refer to “chemical inducers of dimerization” or “CIDs”.

### Cas9

[0234] The term “Cas9” or “Cas9 nuclease” refers to an RNA-guided nuclease comprising a Cas9 domain, or a fragment thereof (e.g., a protein comprising an active or inactive DNA cleavage domain of Cas9, and/or the gRNA binding domain of Cas9). A “Cas9 domain” as used herein, is a protein fragment comprising an active or inactive cleavage domain of Cas9 and/or the gRNA binding domain of Cas9. A “Cas9 protein” is a full length Cas9 protein. A Cas9 nuclease is also referred to sometimes as a casn1 nuclease or a CRISPR (Clustered Regularly Interspaced Short Palindromic Repeat)-associated nuclease. CRISPR is an adaptive immune system that provides protection against mobile genetic elements (viruses, transposable elements, and conjugative plasmids). CRISPR clusters contain spacers, sequences complementary to antecedent mobile elements, and target invading nucleic acids. CRISPR clusters are transcribed and processed into CRISPR RNA (crRNA). In type II CRISPR systems correct processing of pre-crRNA requires a trans-encoded small RNA (tracrRNA), endogenous ribonuclease 3 (rnc) and a Cas9 domain The tracrRNA serves as a guide for ribonuclease 3-aided processing of pre-crRNA. Subsequently, Cas9/crRNA/tracrRNA endonucleolytically cleaves a linear or circular dsDNA target complementary to the spacer. The target strand not complementary to crRNA is first cut endonucleolytically, then trimmed 3′-5′ exonucleolytically. In nature, DNA-binding and cleavage typically requires protein and both RNAs. However, single guide RNAs (“sgRNA”, or simply “gNRA”) can be engineered to incorporate aspects of both the crRNA and tracrRNA into a single RNA species. See, e.g., Jinek M., Chylinski K., Fonfara I., Hauer M., Doudna J. A., Charpentier E. Science 337:816-821(2012), the entire contents of which are hereby incorporated by reference. Cas9 recognizes a short motif in the CRISPR repeat sequences (the PAM or protospacer adjacent motif) to help distinguish self versus non-self. Cas9 nuclease sequences and structures are well known to those of skill in the art (see, e.g., “Complete genome sequence of an Ml strain of Streptococcus pyogenes.” Ferretti et al., J. J., McShan W. M., Ajdic D. J., Savic D. J., Savic G., Lyon K., Primeaux C., Sezate S., Suvorov A. N., Kenton S., Lai H. S., Lin S. P., Qian Y., Jia H. G., Najar F. Z., Ren Q., Zhu H., Song L., White J., Yuan X., Clifton S.W., Roe B. A., McLaughlin R. E., Proc. Natl. Acad. Sci. U.S.A. 98:4658-4663(2001); “CRISPR RNA maturation by trans-encoded small RNA and host factor RNase III.” Deltcheva E., Chylinski K., Sharma C. M., Gonzales K., Chao Y., Pirzada Z. A., Eckert M. R., Vogel J., Charpentier E., Nature 471:602-607(2011); and “A programmable dual-RNA-guided DNA endonuclease in adaptive bacterial immunity.” Jinek M., Chylinski K., Fonfara I., Hauer M., Doudna J. A., Charpentier E. Science 337:816-821(2012), the entire contents of each of which are incorporated herein by reference). Cas9 orthologs have been described in various species, including, but not limited to, S. pyogenes and S. thermophilus. Additional suitable Cas9 nucleases and sequences will be apparent to those of skill in the art based on this disclosure, and such Cas9 nucleases and sequences include Cas9 sequences from the organisms and loci disclosed in Chylinski, Rhun, and Charpentier, “The tracrRNA and Cas9 families of type II CRISPR-Cas immunity systems” (2013) RNA Biology 10:5, 726-737; the entire contents of which are incorporated herein by reference. In some embodiments, a Cas9 nuclease comprises one or more mutations that partially impair or inactivate the DNA cleavage domain

[0235] A nuclease-inactivated Cas9 domain may interchangeably be referred to as a “dCas9” protein (for nuclease-“dead” Cas9). Methods for generating a Cas9 domain (or a fragment thereof) having an inactive DNA cleavage domain are known (see, e.g., Jinek et al., Science. 337:816-821(2012); Qi et al., “Repurposing CRISPR as an RNA-Guided Platform for Sequence-Specific Control of Gene Expression” (2013) Cell. 28; 152(5):1173-83, the entire contents of each of which are incorporated herein by reference). For example, the DNA cleavage domain of Cas9 is known to include two subdomains, the HNH nuclease subdomain and the RuvC1 subdomain The HNH subdomain cleaves the strand complementary to the gRNA, whereas the RuvC1 subdomain cleaves the non-complementary strand. Mutations within these subdomains can silence the nuclease activity of Cas9. For example, the mutations DlOA and H840A completely inactivate the nuclease activity of S. pyogenes Cas9 (Jinek et al., Science. 337:816-821(2012); Qi et al., Cell. 28; 152(5):1173-83 (2013)). In some embodiments, proteins comprising fragments of Cas9 are provided. For example, in some embodiments, a protein comprises one of two Cas9 domains: (1) the gRNA binding domain of Cas9; or (2) the DNA cleavage domain of Cas9. In some embodiments, proteins comprising Cas9 or fragments thereof are referred to as “Cas9 variants.” A Cas9 variant shares homology to Cas9, or a fragment thereof. For example, a Cas9 variant is at least about 70% identical, at least about 80% identical, at least about 90% identical, at least about 95% identical, at least about 96% identical, at least about 97% identical, at least about 98% identical, at least about 99% identical, at least about 99.5% identical, at least about 99.8% identical, or at least about 99.9% identical to wild type Cas9 (e.g., SpCas9 of SEQ ID NO: 18). In some embodiments, the Cas9 variant may have 1, 2, 3, 4, 5, 6, 7, 8, 9, 10, 11, 12, 13, 14, 15, 16, 17, 18, 19, 20, 21, 22, 21, 24, 25, 26, 27, 28, 29, 30, 31, 32, 33, 34, 35, 36, 37, 38, 39, 40, 41, 42, 43, 44, 45, 46, 47, 48, 49, 50, or more amino acid changes compared to wild type Cas9 (e.g., SpCas9 of SEQ ID NO: 18). In some embodiments, the Cas9 variant comprises a fragment of SEQ ID NO: 18 Cas9 (e.g., a gRNA binding domain or a DNA-cleavage domain), such that the fragment is at least about 70% identical, at least about 80% identical, at least about 90% identical, at least about 95% identical, at least about 96% identical, at least about 97% identical, at least about 98% identical, at least about 99% identical, at least about 99.5% identical, or at least about 99.9% identical to the corresponding fragment of wild type Cas9 (e.g., SpCas9 of SEQ ID NO: 18). In some embodiments, the fragment is at least 30%, at least 35%, at least 40%, at least 45%, at least 50%, at least 55%, at least 60%, at least 65%, at least 70%, at least 75%, at least 80%, at least 85%, at least 90%, at least 95% identical, at least 96%, at least 97%, at least 98%, at least 99%, or at least 99.5% of the amino acid length of a corresponding wild type Cas9 (e.g., SpCas9 of SEQ ID NO: 18).

cDNA

[0236] The term “cDNA” refers to a strand of DNA copied from an RNA template. cDNA is complementary to the RNA template.

### Circular Permutant

[0237] As used herein, the term “circular permutant” refers to a protein or polypeptide (e.g., a Cas9) comprising a circular permutation, which is a change in the protein's structural configuration involving a change in the order of amino acids appearing in the protein's amino acid sequence. In other words, circular permutants are proteins that have altered N- and C-termini as compared to a wild-type counterpart, e.g., the wild-type C-terminal half of a protein becomes the new N-terminal half. Circular permutation (or CP) is essentially the topological rearrangement of a protein's primary sequence, connecting its N- and C-terminus, often with a peptide linker, while concurrently splitting its sequence at a different position to create new, adjacent N- and C-termini The result is a protein structure with different connectivity, but which often can have the same overall similar three-dimensional (3D) shape, and possibly include improved or altered characteristics, including, reduced proteolytic susceptibility, improved catalytic activity, altered substrate or ligand binding, and/or improved thermostability. Circular permutant proteins can occur in nature (e.g., concanavalin A and lectin). In addition, circular permutation can occur as a result of posttranslational modifications or may be engineered using recombinant techniques.

### Circularly Permuted Cas9

[0238] The term “circularly permuted Cas9” refers to any Cas9 protein, or variant thereof, that has been occurs as a circular permutant, whereby its N- and C-termini have been topically rearranged. Such circularly permuted Cas9 proteins (“CP-Cas9”), or variants thereof, retain the ability to bind DNA when complexed with a guide RNA (gRNA). See, Oakes et al., “Protein Engineering of Cas9 for enhanced function,” Methods Enzymol, 2014, 546: 491-511 and Oakes et al., “CRISPR-Cas9 Circular Permutants as Programmable Scaffolds for Genome Modification,” Cell, Jan. 10, 2019, 176: 254-267, each of which are incorporated herein by reference. The instant disclosure contemplates any previously known CP-Cas9 or use of a new CP-Cas9 so long as the resulting circularly permuted protein retains the ability to bind DNA when complexed with a guide RNA (gRNA). Exemplary CP-Cas9 proteins are SEQ ID NOs: 77-86.

### CRISPR

[0239] CRISPR is a family of DNA sequences (i.e., CRISPR clusters) in bacteria and archaea that represent snippets of prior infections by a virus that have invaded the prokaryote. The snippets of DNA are used by the prokaryotic cell to detect and destroy DNA from subsequent attacks by similar viruses and effectively compose, along with an array of CRISPR-associated proteins (including Cas9 and homologs thereof) and CRISPR-associated RNA, a prokaryotic immune defense system. In nature, CRISPR clusters are transcribed and processed into CRISPR RNA (crRNA). In certain types of CRISPR systems (e.g., type II CRISPR systems), correct processing of pre-crRNA requires a trans-encoded small RNA (tracrRNA), endogenous ribonuclease 3 (mc) and a Cas9 protein. The tracrRNA serves as a guide for ribonuclease 3-aided processing of pre-crRNA. Subsequently, Cas9/crRNA/tracrRNA endonucleolytically cleaves a linear or circular dsDNA target complementary to the RNA. Specifically, the target strand not complementary to crRNA is first cut endonucleolytically, then trimmed 3′-5′ exonucleolytically. In nature, DNA-binding and cleavage typically requires protein and both RNAs. However, single guide RNAs (“sgRNA”, or simply “gNRA”) can be engineered so as to incorporate aspects of both the crRNA and tracrRNA into a single RNA species—the guide RNA. See, e.g., Jinek M., Chylinski K., Fonfara I., Hauer M., Doudna J. A., Charpentier E. Science 337:816-821(2012), the entire contents of which is hereby incorporated by reference. Cas9 recognizes a short motif in the CRISPR repeat sequences (the PAM or protospacer adjacent motif) to help distinguish self versus non-self. CRISPR biology, as well as Cas9 nuclease sequences and structures are well known to those of skill in the art (see, e.g., “Complete genome sequence of an M1 strain of Streptococcus pyogenes.” Ferretti et al., J. J., McShan W. M., Ajdic D. J., Savic D. J., Savic G., Lyon K., Primeaux C., Sezate S., Suvorov A. N., Kenton S., Lai H. S., Lin S. P., Qian Y., Jia H. G., Najar F. Z., Ren Q., Zhu H., Song L., White J., Yuan X., Clifton S. W., Roe B. A., McLaughlin R. E., Proc. Natl. Acad. Sci. U.S.A. 98:4658-4663(2001); “CRISPR RNA maturation by trans-encoded small RNA and host factor RNase III.” Deltcheva E., Chylinski K., Sharma C. M., Gonzales K., Chao Y., Pirzada Z. A., Eckert M. R., Vogel J., Charpentier E., Nature 471:602-607(2011); and “A programmable dual-RNA-guided DNA endonuclease in adaptive bacterial immunity.” Jinek M., Chylinski K., Fonfara I., Hauer M., Doudna J.A., Charpentier E. Science 337:816-821(2012), the entire contents of each of which are incorporated herein by reference). Cas9 orthologs have been described in various species, including, but not limited to, S. pyogenes and S. thermophilus. Additional suitable Cas9 nucleases and sequences will be apparent to those of skill in the art based on this disclosure, and such Cas9 nucleases and sequences include Cas9 sequences from the organisms and loci disclosed in Chylinski, Rhun, and Charpentier, “The tracrRNA and Cas9 families of type II CRISPR-Cas immunity systems” (2013) RNA Biology 10:5, 726-737; the entire contents of which are incorporated herein by reference.

[0240] In certain types of CRISPR systems (e.g., type II CRISPR systems), correct processing of pre-crRNA requires a trans-encoded small RNA (tracrRNA), endogenous ribonuclease 3 (mc), and a Cas9 protein. The tracrRNA serves as a guide for ribonuclease 3-aided processing of pre-crRNA. Subsequently, Cas9/crRNA/tracrRNA endonucleolytically cleaves a linear or circular nucleic acid target complementary to the RNA. Specifically, the target strand not complementary to crRNA is first cut endonucleolytically, then trimmed 3′-5′ exonucleolytically. In nature, DNA-binding and cleavage typically requires protein and both RNAs. However, single guide RNAs (“sgRNA”, or simply “gRNA”) can be engineered to incorporate embodiments of both the crRNA and tracrRNA into a single RNA species—the guide RNA.

[0241] In general, a “CRISPR system” refers collectively to transcripts and other elements involved in the expression of or directing the activity of CRISPR-associated (“Cas”) genes, including sequences encoding a Cas gene, a tracr (trans-activating CRISPR) sequence (e.g. tracrRNA or an active partial tracrRNA), a tracr mate sequence (encompassing a “direct repeat” and a tracrRNA-processed partial direct repeat in the context of an endogenous CRISPR system), a guide sequence (also referred to as a “spacer” in the context of an endogenous CRISPR system), or other sequences and transcripts from a CRISPR locus. The tracrRNA of the system is complementary (fully or partially) to the tracr mate sequence present on the guide RNA.

### DNA Synthesis Template

[0242] As used herein, the term “DNA synthesis template” refers to the region or portion of the extension arm of a PEgRNA that is utilized as a template strand by a polymerase of a prime editor to encode a 3′ single-strand DNA flap that contains the desired edit and which then, through the mechanism of prime editing, replaces the corresponding endogenous strand of DNA at the target site. In various embodiments, the DNA synthesis template is shown in FIG. 3A (in the context of a PEgRNA comprising a 5′ extension arm), FIG. 3B (in the context of a PEgRNA comprising a 3′ extension arm), FIG. 3C (in the context of an internal extension arm), FIG. 3D (in the context of a 3′ extension arm), and FIG. 3E (in the context of a 5′ extension arm). The extension arm, including the DNA synthesis template, may be comprised of DNA or RNA. In the case of RNA, the polymerase of the prime editor can be an RNA-dependent DNA polymerase (e.g., a reverse transcriptase). In the case of DNA, the polymerase of the prime editor can be a DNA-dependent DNA polymerase. In various embodiments (e.g., as depicted in FIGS. 3D-3E), the DNA synthesis template (4) may comprise the “edit template” and the “homology arm”, and all or a portion of the optional 5′ end modifier region, e2. That is, depending on the nature of the e2 region (e.g., whether it includes a hairpin, toeloop, or stem/loop secondary structure), the polymerase may encode none, some, or all of the e2 region, as well. Said another way, in the case of a 3′ extension arm, the DNA synthesis template (3) can include the portion of the extension arm (3) that spans from the 5′ end of the primer binding site (PBS) to 3′ end of the gRNA core that may operate as a template for the synthesis of a single-strand of DNA by a polymerase (e.g., a reverse transcriptase). In the case of a 5′ extension arm, the DNA synthesis template (3) can include the portion of the extension arm (3) that spans from the 5′ end of the PEgRNA molecule to the 3′ end of the edit template. Preferably, the DNA synthesis template excludes the primer binding site (PBS) of PEgRNAs either having a 3′ extension arm or a 5′ extension arm. Certain embodiments described here (e.g, FIG. 71A) refer to an “an RT template,” which is inclusive of the edit template and the homology arm, i.e., the sequence of the PEgRNA extension arm which is actually used as a template during DNA synthesis. The term “RT template” is equivalent to the term “DNA synthesis template.”

[0243] In the case of trans prime editing (e.g., FIG. 3G and FIG. 3H), the primer binding site (PBS) and the DNA synthesis template can be engineered into a separate molecule referred to as a trans prime editor RNA template (tPERT).

### Dimerization Domain

[0244] The term “dimerization domain” refers to a ligand-binding domain that binds to a binding moiety of a bi-specific ligand. A “first” dimerization domain binds to a first binding moiety of a bi-specific ligand and a “second” dimerization domain binds to a second binding moiety of the same bi-specific ligand. When the first dimerization domain is fused to a first protein (e.g., via PE, as discussed herein) and the second dimerization domain (e.g., via PE, as discussed herein) is fused to a second protein, the first and second protein dimerize in the presence of a bi-specific ligand, wherein the bi-specific ligand has at least one moiety that binds to the first dimerization domain and at least another moiety that binds to the second dimerization domain.

### Downstream

[0245] As used herein, the terms “upstream” and “downstream” are terms of relativity that define the linear position of at least two elements located in a nucleic acid molecule (whether single or double-stranded) that is orientated in a 5′-to-3′ direction. In particular, a first element is upstream of a second element in a nucleic acid molecule where the first element is positioned somewhere that is 5′ to the second element. For example, a SNP is upstream of a Cas9-induced nick site if the SNP is on the 5′ side of the nick site. Conversely, a first element is downstream of a second element in a nucleic acid molecule where the first element is positioned somewhere that is 3′ to the second element. For example, a SNP is downstream of a Cas9-induced nick site if the SNP is on the 3′ side of the nick site. The nucleic acid molecule can be a DNA (double or single stranded). RNA (double or single stranded), or a hybrid of DNA and RNA. The analysis is the same for single strand nucleic acid molecule and a double strand molecule since the terms upstream and downstream are in reference to only a single strand of a nucleic acid molecule, except that one needs to select which strand of the double stranded molecule is being considered. Often, the strand of a double stranded DNA which can be used to determine the positional relativity of at least two elements is the “sense” or “coding” strand. In genetics, a “sense” strand is the segment within double-stranded DNA that runs from 5′ to 3′, and which is complementary to the antisense strand of DNA, or template strand, which runs from 3′ to 5′. Thus, as an example, a SNP nucleobase is “downstream” of a promoter sequence in a genomic DNA (which is double-stranded) if the SNP nucleobase is on the 3′ side of the promoter on the sense or coding strand.

### Edit Template

[0246] The term “edit template” refers to a portion of the extension arm that encodes the desired edit in the single strand 3′ DNA flap that is synthesized by the polymerase, e.g., a DNA-dependent DNA polymerase, RNA-dependent DNA polymerase (e.g., a reverse transcriptase). Certain embodiments described here (e.g., FIG. 71A) refer to “an RT template,” which refers to both the edit template and the homology arm together, i.e., the sequence of the PEgRNA extension arm which is actually used as a template during DNA synthesis. The term “RT edit template” is also equivalent to the term “DNA synthesis template,” but wherein the RT edit template reflects the use of a prime editor having a polymerase that is a reverse transcriptase, and wherein the DNA synthesis template reflects more broadly the use of a prime editor having any polymerase.

### Effective Amount

[0247] The term “effective amount,” as used herein, refers to an amount of a biologically active agent that is sufficient to elicit a desired biological response. For example, in some embodiments, an effective amount of a prime editor (PE) may refer to the amount of the editor that is sufficient to edit a target site nucleotide sequence, e.g., a genome. In some embodiments, an effective amount of a prime editor (PE) provided herein, e.g., of a fusion protein comprising a nickase Cas9 domain and a reverse transcriptase may refer to the amount of the fusion protein that is sufficient to induce editing of a target site specifically bound and edited by the fusion protein. As will be appreciated by the skilled artisan, the effective amount of an agent, e.g., a fusion protein, a nuclease, a hybrid protein, a protein dimer, a complex of a protein (or protein dimer) and a polynucleotide, or a polynucleotide, may vary depending on various factors as, for example, on the desired biological response, e.g., on the specific allele, genome, or target site to be edited, on the cell or tissue being targeted, and on the agent being used.

### Error-Prone Reverse Transcriptase

[0248] As used herein, the term “error-prone” reverse transcriptase (or more broadly, any polymerase) refers to a reverse transcriptase (or more broadly, any polymerase) that occurs naturally or which has been derived from another reverse transcriptase (e.g., a wild type M-MLV reverse transcriptase) which has an error rate that is less than the error rate of wild type M-MLV reverse transcriptase. The error rate of wild type M-MLV reverse transcriptase is reported to be in the range of one error in 15,000 (higher) to 27,000 (lower). An error rate of 1 in 15,000 corresponds with an error rate of 6.7×10⁻⁵. An error rate of 1 in 27,000 corresponds with an error rate of 3.7×10⁵. See Boutabout et al. (2001) “DNA synthesis fidelity by the reverse transcriptase of the yeast retrotransposon Ty1,” Nucleic Acids Res 29(11):2217-2222, which is incorporated herein by reference. Thus, for purposes of this application, the term “error prone” refers to those RT that have an error rate that is greater than one error in 15,000 nucleobase incorporation (6.7×10⁻⁵ or higher), e.g., 1 error in 14,000 nucleobases (7.14×10⁻⁵ or higher), 1 error in 13,000 nucleobases or fewer (7.7×10⁻⁵ or higher), 1 error in 12,000 nucleobases or fewer (7.7×10⁻⁵ or higher), 1 error in 11,000 nucleobases or fewer (9.1×10⁻⁵ or higher), 1 error in 10,000 nucleobases or fewer (1×10 or 0.0001 or higher), 1 error in 9,000 nucleobases or fewer (0.00011 or higher), 1 error in 8,000 nucleobases or fewer (0.00013 or higher) 1 error in 7,000 nucleobases or fewer (0.00014 or higher), 1 error in 6,000 nucleobases or fewer (0.00016 or higher), 1 error in 5,000 nucleobases or fewer (0.0002 or higher), 1 error in 4,000 nucleobases or fewer (0.00025 or higher), 1 error in 3,000 nucleobases or fewer (0.00033 or higher), 1 error in 2,000 nucleobase or fewer (0.00050 or higher), or 1 error in 1,000 nucleobases or fewer (0.001 or higher), or 1 error in 500 nucleobases or fewer (0.002 or higher), or 1 error in 250 nucleobases or fewer (0.004 or higher).

### Extein

[0249] The term “extein,” as used herein, refers to an polypeptide sequence that is flanked by an intein and is ligated to another extein during the process of protein splicing to form a mature, spliced protein. Typically, an intein is flanked by two extein sequences that are ligated together when the intein catalyzes its own excision. Exteins, accordingly, are the protein analog to exons found in mRNA. For example, a polypeptide comprising an intein may be of the structure extein(N)—intein—extein(C). After excision of the intein and splicing of the two exteins, the resulting structures are extein(N)—extein(C) and a free intein. In various configurations, the exteins may be separate proteins (e.g., half of a Cas9 or PE fusion protein), each fused to a split-intein, wherein the excision of the split inteins causes the splicing together of the extein sequences.

### Extension Arm

[0250] The term “extension arm” refers to a nucleotide sequence component of a PEgRNA which provides several functions, including a primer binding site and an edit template for reverse transcriptase. In some embodiments, e.g., FIG. 3D, the extension arm is located at the 3′ end of the guide RNA. In other embodiments, e.g., FIG. 3E, the extension arm is located at the 5′ end of the guide RNA. In some embodiments, the extension arm also includes a homology arm. In various embodiments, the extension arm comprises the following components in a 5′ to 3′ direction: the homology arm, the edit template, and the primer binding site. Since polymerization activity of the reverse transcriptase is in the 5′ to 3′ direction, the preferred arrangement of the homology arm, edit template, and primer binding site is in the 5′ to 3′ direction such that the reverse transcriptase, once primed by an annealed primer sequence, polymerizes a single strand of DNA using the edit template as a complementary template strand. Further details, such as the length of the extension arm, are described elsewhere herein.

[0251] The extension arm may also be described as comprising generally two regions: a primer binding site (PBS) and a DNA synthesis template, as shown in FIG. 3G (top), for instance. The primer binding site binds to the primer sequence that is formed from the endogenous DNA strand of the target site when it becomes nicked by the prime editor complex, thereby exposing a 3′ end on the endogenous nicked strand. As explained herein, the binding of the primer sequence to the primer binding site on the extension arm of the PEgRNA creates a duplex region with an exposed 3′ end (i.e., the 3′ of the primer sequence), which then provides a substrate for a polymerase to begin polymerizing a single strand of DNA from the exposed 3′ end along the length of the DNA synthesis template. The sequence of the single strand DNA product is the complement of the DNA synthesis template. Polymerization continues towards the 5′ of the DNA synthesis template (or extension arm) until polymerization terminates. Thus, the DNA synthesis template represents the portion of the extension arm that is encoded into a single strand DNA product (i.e., the 3′ single strand DNA flap containing the desired genetic edit information) by the polymerase of the prime editor complex and which ultimately replaces the corresponding endogenous DNA strand of the target site that sits immediately downstream of the PE-induced nick site. Without being bound by theory, polymerization of the DNA synthesis template continues towards the 5′ end of the extension arm until a termination event. Polymerization may terminate in a variety of ways, including, but not limited to (a) reaching a 5′ terminus of the PEgRNA (e.g., in the case of the 5′ extension arm wherein the DNA polymerase simply runs out of template), (b) reaching an impassable RNA secondary structure (e.g., hairpin or stem/loop), or (c) reaching a replication termination signal, e.g., a specific nucleotide sequence that blocks or inhibits the polymerase, or a nucleic acid topological signal, such as, supercoiled DNA or RNA.

### Flap Endonuclease (e.g., FEN1)

[0252] As used herein, the term “flap endonuclease” refers to an enzyme that catalyzes the removal of 5′ single strand DNA flaps. These are naturally occurring enzymes that process the removal of 5′ flaps formed during cellular processes, including DNA replication. The prime editing methods herein described may utilize endogenously supplied flap endonucleases or those provided in trans to remove the 5′ flap of endogenous DNA formed at the target site during prime editing. Flap endonucleases are known in the art and can be found described in Patel et al., “Flap endonucleases pass 5′-flaps through a flexible arch using a disorder-thread-order mechanism to confer specificity for free 5′-ends,” Nucleic Acids Research, 2012, 40(10): 4507-4519, Tsutakawa et al., “Human flap endonuclease structures, DNA double-base flipping, and a unified understanding of the FEN1 superfamily,” Cell, 2011, 145(2): 198-211, and Balakrishnan et al., “Flap Endonuclease 1,” Annu Rev Biochem, 2013, Vol 82: 119-138 (each of which are incorporated herein by reference). An exemplary flap endonuclease is FEN1, which can be represented by the following amino acid sequence:

| DESCRIPTION | SEQUENCE | SEQ ID NO: |
|---|---|---|
| FEN1 | MGIQGLAKLIADVAPSAIRENDIKSYFGRKVAIDASMSIYQFL | SEQ ID NO: 7 |
| WILD TYPE | IAVRQGGDVLQNEEGETTSHLMGMFYRTIRMMENGIKPVY | |
| | VFDGKPPQLKSGELAKRSERRAEAEKQLQQAQAAGAEQEV | |
| | EKFTKRLVKVTKQHNDECKHLLSLMGIPYLDAPSEAEASCA | |
| | ALVKAGKVYAAATEDMDCLTFGSPVLMRHLTASEAKKLPIQ | |
| | EFHLSRILQELGLNQEQFVDLCILLGSDYCESIRGIGPKRAVD | |
| | LIQKHKSIEEIVRRLDPNKYPVPENWLHKEAHQLFLEPEVLD | |
| | PESVELKWSEPNEEELIKFMCGEKQFSEERIRSGVKRLSKSR | |
| | QGSTQGRLDDFFKVTGSLSSAKRKEPEPKGSTKKKAKTGAA | |
| | GKFKRGK | |

### Functional Equivalent

[0253] The term “functional equivalent” refers to a second biomolecule that is equivalent in function, but not necessarily equivalent in structure to a first biomolecule. For example, a “Cas9 equivalent” refers to a protein that has the same or substantially the same functions as Cas9, but not necessarily the same amino acid sequence. In the context of the disclosure, the specification refers throughout to “a protein X, or a functional equivalent thereof.” In this context, a “functional equivalent” of protein X embraces any homolog, paralog, fragment, naturally occurring, engineered, mutated, or synthetic version of protein X which bears an equivalent function.

### Fusion Protein

[0254] The term “fusion protein” as used herein refers to a hybrid polypeptide which comprises protein domains from at least two different proteins. One protein may be located at the amino-terminal (N-terminal) portion of the fusion protein or at the carboxy-terminal (C-terminal) protein thus forming an “amino-terminal fusion protein” or a “carboxy-terminal fusion protein,” respectively. A protein may comprise different domains, for example, a nucleic acid binding domain (e.g., the gRNA binding domain of Cas9 that directs the binding of the protein to a target site) and a nucleic acid cleavage domain or a catalytic domain of a nucleic-acid editing protein. Another example includes a Cas9 or equivalent thereof to a reverse transcriptase. Any of the proteins provided herein may be produced by any method known in the art. For example, the proteins provided herein may be produced via recombinant protein expression and purification, which is especially suited for fusion proteins comprising a peptide linker. Methods for recombinant protein expression and purification are well known, and include those described by Green and Sambrook, Molecular Cloning: A Laboratory Manual (4^{th} ed., Cold Spring Harbor Laboratory Press, Cold Spring Harbor, N.Y. (2012)), the entire contents of which are incorporated herein by reference.

### Gene of Interest (GOI)

[0255] The term “gene of interest” or “GOI” refers to a gene that encodes a biomolecule of interest (e.g., a protein or an RNA molecule). A protein of interest can include any intracellular protein, membrane protein, or extracellular protein, e.g., a nuclear protein, transcription factor, nuclear membrane transporter, intracellular organelle associated protein, a membrane receptor, a catalytic protein, and enzyme, a therapeutic protein, a membrane protein, a membrane transport protein, a signal transduction protein, or an immunological protein (e.g., an IgG or other antibody protein), etc. The gene of interest may also encode an RNA molecule, including, but not limited to, messenger RNA (mRNA), transfer RNA (tRNA), ribosomal RNA (rRNA), small nuclear RNA (snRNA), antisense RNA, guide RNA, microRNA (miRNA), small interfering RNA (siRNA), and cell-free RNA (cfRNA).

Guide RNA (“gRNA”)

[0256] As used herein, the term “guide RNA” is a particular type of guide nucleic acid which is mostly commonly associated with a Cas protein of a CRISPR-Cas9 and which associates with Cas9, directing the Cas9 protein to a specific sequence in a DNA molecule that includes complementarity to the protospacer sequence of the guide RNA. However, this term also embraces the equivalent guide nucleic acid molecules that associate with Cas9 equivalents, homologs, orthologs, or paralogs, whether naturally occurring or non-naturally occurring (e.g., engineered or recombinant), and which otherwise program the Cas9 equivalent to localize to a specific target nucleotide sequence. The Cas9 equivalents may include other napDNAbp from any type of CRISPR system (e.g., type II, V, VI), including Cpf1 (a type-V CRISPR-Cas systems), C2c1 (a type V CRISPR-Cas system), C2c2 (a type VI CRISPR-Cas system) and C2c3 (a type V CRISPR-Cas system). Further Cas-equivalents are described in Makarova et al., “C2c2 is a single-component programmable RNA-guided RNA-targeting CRISPR effector,” Science 2016; 353(6299), the contents of which are incorporated herein by reference. Exemplary sequences are and structures of guide RNAs are provided herein. In addition, methods for designing appropriate guide RNA sequences are provided herein. As used herein, the “guide RNA” may also be referred to as a “traditional guide RNA” to contrast it with the modified forms of guide RNA termed “prime editing guide RNAs” (or “PEgRNAs”) which have been invented for the prime editing methods and composition disclosed herein.

[0257] Guide RNAs or PEgRNAs may comprise various structural elements that include, but are not limited to:

[0258] Spacer sequence—the sequence in the guide RNA or PEgRNA (having about 20 nts in length) which binds to the protospacer in the target DNA.

[0259] gRNA core (or gRNA scaffold or backbone sequence)—refers to the sequence within the gRNA that is responsible for Cas9 binding, it does not include the 20 bp spacer/targeting sequence that is used to guide Cas9 to target DNA.

[0260] Extension arm—a single strand extension at the 3′ end or the 5′ end of the PEgRNA which comprises a primer binding site and a DNA synthesis template sequence that encodes via a polymerase (e.g., a reverse transcriptase) a single stranded DNA flap containing the genetic change of interest, which then integrates into the endogenous DNA by replacing the corresponding endogenous strand, thereby installing the desired genetic change.

[0261] Transcription terminator—the guide RNA or PEgRNA may comprise a transcriptional termination sequence at the 3′ of the molecule.

### Homology Arm

[0262] The term “homology arm” refers to a portion of the extension arm that encodes a portion of the resulting reverse transcriptase-encoded single strand DNA flap that is to be integrated into the target DNA site by replacing the endogenous strand. The portion of the single strand DNA flap encoded by the homology arm is complementary to the non-edited strand of the target DNA sequence, which facilitates the displacement of the endogenous strand and annealing of the single strand DNA flap in its place, thereby installing the edit. This component is further defined elsewhere. The homology arm is part of the DNA synthesis template since it is by definition encoded by the polymerase of the prime editors described herein.

### Host Cell

[0263] The term “host cell,” as used herein, refers to a cell that can host, replicate, and express a vector described herein, e.g., a vector comprising a nucleic acid molecule encoding a fusion protein comprising a Cas9 or Cas9 equivalent and a reverse transcriptase.

### Inteins

[0264] As used herein, the term “intein” refers to auto-processing polypeptide domains found in organisms from all domains of life. An intein (intervening protein) carries out a unique auto-processing event known as protein splicing in which it excises itself out from a larger precursor polypeptide through the cleavage of two peptide bonds and, in the process, ligates the flanking extein (external protein) sequences through the formation of a new peptide bond. This rearrangement occurs post-translationally (or possibly co-translationally), as intein genes are found embedded in frame within other protein-coding genes. Furthermore, intein-mediated protein splicing is spontaneous; it requires no external factor or energy source, only the folding of the intein domain. This process is also known as cis-protein splicing, as opposed to the natural process of trans-protein splicing with “split inteins.” Inteins are the protein equivalent of the self-splicing RNA introns (see Perler et al., Nucleic Acids Res. 22:1125-1127 (1994)), which catalyze their own excision from a precursor protein with the concomitant fusion of the flanking protein sequences, known as exteins (reviewed in Perler et al., Curr. Opin. Chem. Biol. 1:292-299 (1997); Perler, F. B. Cell 92(1):1-4 (1998); Xu et al., EMBO J. 15(19):5146-5153 (1996)).

[0265] As used herein, the term “protein splicing” refers to a process in which an interior region of a precursor protein (an intein) is excised and the flanking regions of the protein (exteins) are ligated to form the mature protein. This natural process has been observed in numerous proteins from both prokaryotes and eukaryotes (Perler, F. B., Xu, M. Q., Paulus, H. Current Opinion in Chemical Biology 1997, 1, 292-299; Perler, F. B. Nucleic Acids Research 1999, 27, 346-347). The intein unit contains the necessary components needed to catalyze protein splicing and often contains an endonuclease domain that participates in intein mobility (Perler, F. B., Davis, E. O., Dean, G. E., Gimble, F. S., Jack, W. E., Neff, N., Noren, C. J., Thomer, J., Belfort, M. Nucleic Acids Research 1994, 22, 1127-1127). The resulting proteins are linked, however, not expressed as separate proteins. Protein splicing may also be conducted in trans with split inteins expressed on separate polypeptides spontaneously combine to form a single intein which then undergoes the protein splicing process to join to separate proteins.

[0266] The elucidation of the mechanism of protein splicing has led to a number of intein-based applications (Comb, et al., U.S. Pat. No. 5,496,714; Comb, et al., U.S. Pat. No. 5,834,247; Camarero and Muir, J. Amer. Chem. Soc., 121:5597-5598 (1999); Chong, et al., Gene, 192:271-281 (1997), Chong, et al., Nucleic Acids Res., 26:5109-5115 (1998); Chong, et al., J. Biol. Chem., 273:10567-10577 (1998); Cotton, et al. J. Am. Chem. Soc., 121:1100-1101 (1999); Evans, et al., J. Biol. Chem., 274:18359-18363 (1999); Evans, et al., J. Biol. Chem., 274:3923-3926 (1999); Evans, et al., Protein Sci., 7:2256-2264 (1998); Evans, et al., J. Biol. Chem., 275:9091-9094 (2000); Iwai and Pluckthun, FEBS Lett. 459:166-172 (1999); Mathys, et al., Gene, 231:1-13 (1999); Mills, et al., Proc. Natl. Acad. Sci. USA 95:3543-3548 (1998); Muir, et al., Proc. Natl. Acad. Sci. USA 95:6705-6710 (1998); Otomo, et al., Biochemistry 38:16040-16044 (1999); Otomo, et al., J. Biolmol. NMR 14:105-114 (1999); Scott, et al., Proc. Natl. Acad. Sci. USA 96:13638-13643 (1999); Severinov and Muir, J. Biol. Chem., 273:16205-16209 (1998); Shingledecker, et al., Gene, 207:187-195 (1998); Southworth, et al., EMBO J. 17:918-926 (1998); Southworth, et al., Biotechniques, 27:110-120 (1999); Wood, et al., Nat. Biotechnol., 17:889-892 (1999); Wu, et al., Proc. Natl. Acad. Sci. USA 95:9226-9231 (1998a); Wu, et al., Biochim Biophys Acta 1387:422-432 (1998b); Xu, et al., Proc. Natl. Acad. Sci. USA 96:388-393 (1999); Yamazaki, et al., J. Am. Chem. Soc., 120:5591-5592 (1998)). Each reference is incorporated herein by reference.

### Ligand-Dependent Intein

[0267] The term “ligand-dependent intein,” as used herein refers to an intein that comprises a ligand-binding domain Typically, the ligand-binding domain is inserted into the amino acid sequence of the intein, resulting in a structure intein (N)—ligand-binding domain—intein (C). Typically, ligand-dependent inteins exhibit no or only minimal protein splicing activity in the absence of an appropriate ligand, and a marked increase of protein splicing activity in the presence of the ligand. In some embodiments, the ligand-dependent intein does not exhibit observable splicing activity in the absence of ligand but does exhibit splicing activity in the presence of the ligand. In some embodiments, the ligand-dependent intein exhibits an observable protein splicing activity in the absence of the ligand, and a protein splicing activity in the presence of an appropriate ligand that is at least 5 times, at least 10 times, at least 50 times, at least 100 times, at least 150 times, at least 200 times, at least 250 times, at least 500 times, at least 1000 times, at least 1500 times, at least 2000 times, at least 2500 times, at least 5000 times, at least 10000 times, at least 20000 times, at least 25000 times, at least 50000 times, at least 100000 times, at least 500000 times, or at least 1000000 times greater than the activity observed in the absence of the ligand. In some embodiments, the increase in activity is dose dependent over at least 1 order of magnitude, at least 2 orders of magnitude, at least 3 orders of magnitude, at least 4 orders of magnitude, or at least 5 orders of magnitude, allowing for fine-tuning of intein activity by adjusting the concentration of the ligand. Suitable ligand-dependent inteins are known in the art, and in include those provided below and those described in published U.S. Patent Application U.S. 2014/0065711 A1; Mootz et al., “Protein splicing triggered by a small molecule.” J. Am. Chem. Soc. 2002; 124, 9044-9045; Mootz et al., “Conditional protein splicing: a new tool to control protein structure and function in vitro and in vivo.” J. Am. Chem. Soc. 2003; 125, 10561-10569; Buskirk et al., Proc. Natl. Acad. Sci. USA. 2004; 101, 10505-10510); Skretas & Wood, “Regulation of protein activity with small-molecule-controlled inteins.” Protein Sci. 2005; 14, 523-532; Schwartz, et al., “Post-translational enzyme activation in an animal via optimized conditional protein splicing.” Nat. Chem. Biol. 2007; 3, 50-54; Peck et al., Chem. Biol. 2011; 18 (5), 619-630; the entire contents of each are hereby incorporated by reference. Exemplary sequences are as follows:

| NAME | SEQUENCE OF LIGAND-DEPENDENT INTEIN |
|---|---|
| 2-4 INTEIN: | CLAEGTRIFDPVTGTTHRIEDVVDGRKPIHVVAAAKDGTLLARPVVSWFD |
| | QGTRDVIGLRIAGGAIVWATPDHKVLTEYGWRAAGELRKGDRVAGPGGS |
| | GNSLALSLTADQMVSALLDAEPPILYSEYDPTSPFSEASMMGLLTNLADRE |
| | LVHMINWAKRVPGFVDLTLHDQAHLLECAWLEILMIGLVWRSMEHPGKL |
| | LFAPNLLLDRNQGKCVEGMVEIFDMLLATSSRFRMMNLQGEEFVCLKSII |
| | LLNSGVYTFLSSTLKSLEEKDHIHRALDKITDTLIHLMAKAGLTLQQQHQR |
| | LAQLLLILSHIRHMSNKGMEHLYSMKYKNVVPLYDLLLEMLDAHRLHAG |
| | GSGASRVQAFADALDDKFLHDMLAEELRYSVIREVLPTRRARTFDLEVEE |
| | LHTLVAEGVVVHNC (SEQ ID NO: 8) |
| 3-2 INTEIN | CLAEGTRIFDPVTGTTHRIEDVVDGRKPIHVVAVAKDGTLLARPVVSWFD |
| | QGTRDVIGLRIAGGAIVWATPDHKVLTEYGWRAAGELRKGDRVAGPGGS |
| | GNSLALSLTADQMVSALLDAEPPILYSEYDPTSPFSEASMMGLLTNLADRE |
| | LVHMINWAKRVPGFVDLTLHDQAHLLECAWLEILMIGLVWRSMEHPGKL |
| | LFAPNLLLDRNQGKCVEGMVEIFDMLLATSSRFRMMNLQGEEFVCLKSII |
| | LLNSGVYTFLSSTLKSLEEKDHIHRALDKITDTLIHLMAKAGLTLQQQHQR |
| | LAQLLLILSHIRHMSNKGMEHLYSMKYTNVVPLYDLLLEMLDAHRLHAG |
| | GSGASRVQAFADALDDKFLHDMLAEELRYSVIREVLPTRRARTFDLEVEE |
| | LHTLVAEGVVVHNC (SEQ ID NO: 9) |
| 30R3-1 INTEIN | CLAEGTRIFDPVTGTTHRIEDVVDGRKPIHVVAAAKDGTLLARPVVSWFD |
| | QGTRDVIGLRIAGGATVWATPDHKVLTEYGWRAAGELRKGDRVAGPGGS |
| | GNSLALSLTADQMVSALLDAEPPIPYSEYDPTSPFSEASMMGLLTNLADRE |
| | LVHMINWAKRVPGFVDLTLHDQAHLLECAWLEILMIGLVWRSMEHPGKL |
| | LFAPNLLLDRNQGKCVEGMVEIFDMLLATSSRFRMMNLQGEEFVCLKSII |
| | LLNSGVYTFLSSTLKSLEEKDHIHRALDKITDTLIHLMAKAGLTLQQQHQR |
| | LAQLLLILSHIRHMSNKGMEHLYSMKYKNVVPLYDLLLEMLDAHRLHAG |
| | GSGASRVQAFADALDDKFLHDMLAEGLRYSVIREVLPTRRARTFDLEVEE |
| | LHTLVAEGVVVHNC (SEQ ID NO: 10) |
| 30R3-2 INTEIN | CLAEGTRIFDPVTGTTHRIEDVVDGRKPIHVVAAAKDGTLLARPVVSWFD |
| | QGTRDVIGLRIAGGATVWATPDHKVLTEYGWRAAGELRKGDRVAGPGGS |
| | GNSLALSLTADQMVSALLDAEPPILYSEYDPTSPFSEASMMGLLTNLADRE |
| | LVHMINWAKRVPGFVDLTLHDQAHLLECAWLEILMIGLVWRSMEHPGKL |
| | LFAPNLLLDRNQGKCVEGMVEIFDMLLATSSRFRMMNLQGEEFVCLKSII |
| | LLNSGVYTFLSSTLKSLEEKDHIHRALDKITDTLIHLMAKAGLTLQQQHQR |
| | LAQLLLILSHIRHMSNKGMEHLYSMKYKNVVPLYDLLLEMLDAHRLHAG |
| | GSGASRVQAFADALDDKFLHDMLAEELRYSVIREVLPTRRARTFDLEVEE |
| | LHTLVAEGVVVHNC (SEQ ID NO: 11) |
| 30R3-3 INTEIN | CLAEGTRIFDPVTGTTHRIEDVVDGRKPIHVVAAAKDGTLLARPVVSWFD |
| | QGTRDVIGLRIAGGATVWATPDHKVLTEYGWRAAGELRKGDRVAGPGGS |
| | GNSLALSLTADQMVSALLDAEPPIPYSEYDPTSPFSEASMMGLLTNLADRE |
| | LVHMINWAKRVPGFVDLTLHDQAHLLECAWLEILMIGLVWRSMEHPGKL |
| | LFAPNLLLDRNQGKCVEGMVEIFDMLLATSSRFRMMNLQGEEFVCLKSII |
| | LLNSGVYTFLSSTLKSLEEKDHIHRALDKITDTLIHLMAKAGLTLQQQHQR |
| | LAQLLLILSHIRHMSNKGMEHLYSMKYKNVVPLYDLLLEMLDAHRLHAG |
| | GSGASRVQAFADALDDKFLHDMLAEELRYSVIREVLPTRRARTFDLEVEE |
| | LHTLVAEGVVVHNC (SEQ ID NO: 12) |
| 37R3-1 INTEIN | CLAEGTRIFDPVTGTTHRIEDVVDGRKPIHVVAAAKDGTLLARPVVSWFD |
| | QGTRDVIGLRIAGGATVWATPDHKVLTEYGWRAAGELRKGDRVAGPGGS |
| | GNSLALSLTADQMVSALLDAEPPILYSEYNPTSPFSEASMMGLLTNLADRE |
| | LVHMINWAKRVPGFVDLTLHDQAHLLERAWLEILMIGLVWRSMEHPGKL |
| | LFAPNLLLDRNQGKCVEGMVEIFDMLLATSSRFRMMNLQGEEFVCLKSII |
| | LLNSGVYTFLSSTLKSLEEKDHIHRALDKITDTLIHLMAKAGLTLQQQHQR |
| | LAQLLLILSHIRHMSNKGMEHLYSMKYKNVVPLYDLLLEMLDAHRLHAG |
| | GSGASRVQAFADALDDKFLHDMLAEGLRYSVIREVLPTRRARTFDLEVEE |
| | LHTLVAEGVVVHNC ((SEQ ID NO: 13) |
| 37R3-2 INTEIN | CLAEGTRIFDPVTGTTHRIEDVVDGRKPIHVVAAAKDGTLLARPVVSWFD |
| | QGTRDVIGLRIAGGAIVWATPDHKVLTEYGWRAAGELRKGDRVAGPGGS |
| | GNSLALSLTADQMVSALLDAEPPILYSEYDPTSPFSEASMMGLLTNLADRE |
| | LVHMINWAKRVPGFVDLTLHDQAHLLERAWLEILMIGLVWRSMEHPGKL |
| | LFAPNLLLDRNQGKCVEGMVEIFDMLLATSSRFRMMNLQGEEFVCLKSII |
| | LLNSGVYTFLSSTLKSLEEKDHIHRALDKITDTLIHLMAKAGLTLQQQHQR |
| | LAQLLLILSHIRHMSNKGMEHLYSMKYKNVVPLYDLLLEMLDAHRLHAG |
| | GSGASRVQAFADALDDKFLHDMLAEGLRYSVIREVLPTRRARTFDLEVEE |
| | LHTLVAEGVVVHNC (SEQ ID NO: 14) |
| 37R3-3 INTEIN | CLAEGTRIFDPVTGTTHRIEDVVDGRKPIHVVAVAKDGTLLARPVVSWFD |
| | QGTRDVIGLRIAGGATVWATPDHKVLTEYGWRAAGELRKGDRVAGPGGS |
| | GNSLALSLTADQMVSALLDAEPPILYSEYDPTSPFSEASMMGLLTNLADRE |
| | LVHMINWAKRVPGFVDLTLHDQAHLLERAWLEILMIGLVWRSMEHPGKL |
| | LFAPNLLLDRNQGKCVEGMVEIFDMLLATSSRFRMMNLQGEEFVCLKSII |
| | LLNSGVYTFLSSTLKSLEEKDHIHRALDKITDTLIHLMAKAGLTLQQQHQR |
| | LAQLLLILSHIRHMSNKGMEHLYSMKYKNVVPLYDLLLEMLDAHRLHAG |
| | GSGASRVQAFADALDDKFLHDMLAEELRYSVIREVLPTRRARTFDLEVEE |
| | LHTLVAEGVVVHNC (SEQ ID NO: 15) |

### Linker

[0268] The term “linker,” as used herein, refers to a molecule linking two other molecules or moieties. The linker can be an amino acid sequence in the case of a linker joining two fusion proteins. For example, a Cas9 can be fused to a reverse transcriptase by an amino acid linker sequence. The linker can also be a nucleotide sequence in the case of joining two nucleotide sequences together. For example, in the instant case, the traditional guide RNA is linked via a spacer or linker nucleotide sequence to the RNA extension of a prime editing guide RNA which may comprise a RT template sequence and an RT primer binding site. In other embodiments, the linker is an organic molecule, group, polymer, or chemical moiety. In some embodiments, the linker is 5-100 amino acids in length, for example, 5, 6, 7, 8, 9, 10, 11, 12, 13, 14, 15, 16, 17, 18, 19, 20, 21, 22, 23, 24, 25, 26, 27, 28, 29, 30, 30-35, 35-40, 40-45, 45-50, 50-60, 60-70, 70-80, 80-90, 90-100, 100-150, or 150-200 amino acids in length. Longer or shorter linkers are also contemplated.

### Isolated

[0269] “Isolated” means altered or removed from the natural state. For example, a nucleic 20 acid or a peptide naturally present in a living animal is not “isolated,” but the same nucleic acid or peptide partially or completely separated from the coexisting materials of its natural state is “isolated.” An isolated nucleic acid or protein can exist in substantially purified form, or can exist in a non-native environment such as, for example, a host cell.

[0270] In some embodiments, a gene of interest is encoded by an isolated nucleic acid. As used herein, the term “isolated,” refers to the characteristic of a material as provided herein being removed from its original or native environment (e.g., the natural environment if it is naturally occurring). Therefore, a naturally-occurring polynucleotide or protein or polypeptide present in a living animal is not isolated, but the same polynucleotide or polypeptide, separated by human intervention from some or all of the coexisting materials in the natural system, is isolated. An artificial or engineered material, for example, a non-naturally occurring nucleic acid construct, such as the expression constructs and vectors described herein, are, accordingly, also referred to as isolated. A material does not have to be purified in order to be isolated. Accordingly, a material may be part of a vector and/or part of a composition, and still be isolated in that such vector or composition is not part of the environment in which the material is found in nature.

### MS2 Tagging Technique

[0271] In various embodiments (e.g., as depicted in the embodiments of FIGS. 72-73 and in Example 19), the term “MS2 tagging technique” refers to the combination of an “RNA-protein interaction domain” (aka “RNA-protein recruitment domain or protein”) paired up with an RNA-binding protein that specifically recognizes and binds to the RNA-protein interaction domain, e.g., a specific hairpin structure. These types of systems can be leveraged to recruit a variety of functionalities to a prime editor complex that is bound to a target site. The MS2 tagging technique is based on the natural interaction of the MS2 bacteriophage coat protein (“MCP” or “MS2cp”) with a stem-loop or hairpin structure present in the genome of the phage, i.e., the “MS2 hairpin.” In the case of prime editing, the MS2 tagging technique comprises introducing the MS2 hairpin into a desired RNA molecule involved in prime editing (e.g., a PEgRNA or a tPERT), which then constitutes a specific interactable binding target for an RNA-binding protein that recognizes and binds to that structure. In the case of the MS2 hairpin, it is recognized and bound by the MS2 bacteriophage coat protein (MCP). And, if MCP is fused to another protein (e.g., a reverse transcriptase or other DNA polymerase), then the MS2 hairpin may be used to “recruit” that other protein in trans to the target site occupied by the prime editing complex.

[0272] The prime editors described herein may incorporate as an aspect any known RNA-protein interaction domain to recruit or “co-localize” specific functions of interest to a prime editor complex. A review of other modular RNA-protein interaction domains are described in the art, for example, in Johansson et al., “RNA recognition by the MS2 phage coat protein,” Sem Virol., 1997, Vol. 8(3): 176-185; Delebecque et al., “Organization of intracellular reactions with rationally designed RNA assemblies,” Science, 2011, Vol. 333: 470-474; Mali et al., “Cas9 transcriptional activators for target specificity screening and paired nickases for cooperative genome engineering,” Nat. Biotechnol., 2013, Vol.31: 833-838; and Zalatan et al., “Engineering complex synthetic transcriptional programs with CRISPR RNA scaffolds,” Cell, 2015, Vol.160: 339-350, each of which are incorporated herein by reference in their entireties. Other systems include the PP7 hairpin, which specifically recruits the PCP protein, and the “com” hairpin, which specifically recruits the Com protein. See Zalatan et al.

[0273] The nucleotide sequence of the MS2 hairpin (or equivalently referred to as the “MS2 aptamer”) is: GCCAACATGAGGATCACCCATGTCTGCAGGGCC (SEQ ID NO: 763).

[0274] The amino acid sequence of the MCP or MS2cp is:

(SEQ ID NO: 764)
GSASNFTQFVLVDNGGTGDVTVAPSNFANGVAEWISSNSRSQAYKVTCS
VRQSSAQNRKYTIKVEVPKVATQTVGGEELPVAGWRSYLNMELTIPIFA
TNSDCELIVKAMQGLLKDGNPIPSAIAANSGIY.

[0275] The MS2 hairpin (or “MS2 aptamer”) may also be referred to as a type of “RNA effector recruitment domain”(or equivalently as “RNA-binding protein recruitment domain” or simply as “recruitment domain”) since it is a physical structure (e.g., a hairpin) that is installed into a PEgRNA or tPERT that effectively recruits other effector functions (e.g., RNA-binding proteins having various functions, such as DNA polymerases or other DNA-modifying enzymes) to the PEgRNA or rPERT that is so modified, and thus, co-localizing effector functions in trans to the prime editing machinery. This application is not intended to be limited in any way to any particular RNA effector recruitment domains and may include any available such domain, including the MS2 hairpin. Example 19 and FIG. 72(b) depicts the use of the MS2 aptamer joined to a DNA synthesis domain (i e , the tPERT molecule) and a prime editor that comprises an MS2cp protein fused to a PE2 to cause the co-localization of the prime editor complex (MS2cp-PE2:sgRNA complex) bound to the target DNA site and the DNA synthesis domain of the tPERT molecule to effectuate the

napDNAbp

[0276] As used herein, the term “nucleic acid programmable DNA binding protein” or “napDNAbp,” of which Cas9 is an example, refer to proteins that use RNA:DNA hybridization to target and bind to specific sequences in a DNA molecule. Each napDNAbp is associated with at least one guide nucleic acid (e.g., guide RNA), which localizes the napDNAbp to a DNA sequence that comprises a DNA strand (i.e., a target strand) that is complementary to the guide nucleic acid, or a portion thereof (e.g., the protospacer of a guide RNA). In other words, the guide nucleic-acid “programs” the napDNAbp (e.g., Cas9 or equivalent) to localize and bind to a complementary sequence.

[0277] Without being bound by theory, the binding mechanism of a napDNAbp—guide RNA complex, in general, includes the step of forming an R-loop whereby the napDNAbp induces the unwinding of a double-strand DNA target, thereby separating the strands in the region bound by the napDNAbp. The guide RNA protospacer then hybridizes to the “target strand.” This displaces a “non-target strand” that is complementary to the target strand, which forms the single strand region of the R-loop. In some embodiments, the napDNAbp includes one or more nuclease activities, which then cut the DNA, leaving various types of lesions. For example, the napDNAbp may comprise a nuclease activity that cuts the non-target strand at a first location, and/or cuts the target strand at a second location. Depending on the nuclease activity, the target DNA can be cut to form a “double-stranded break” whereby both strands are cut. In other embodiments, the target DNA can be cut at only a single site, i.e., the DNA is “nicked” on one strand. Exemplary napDNAbp with different nuclease activities include “Cas9 nickase” (“nCas9”) and a deactivated Cas9 having no nuclease activities (“dead Cas9” or “dCas9”). Exemplary sequences for these and other napDNAbp are provided herein.

### Nickase

[0278] The term “nickase” refers to a Cas9 with one of the two nuclease domains inactivated. This enzyme is capable of cleaving only one strand of a target DNA.

### Nuclear Localization Sequence (NLS)

[0279] The term “nuclear localization sequence” or “NLS” refers to an amino acid sequence that promotes import of a protein into the cell nucleus, for example, by nuclear transport. Nuclear localization sequences are known in the art and would be apparent to the skilled artisan. For example, NLS sequences are described in Plank et al., international PCT application, PCT/EP2000/011690, filed Nov. 23, 2000, published as WO/2001/038547 on May 31, 2001, the contents of which are incorporated herein by reference for its disclosure of exemplary nuclear localization sequences. In some embodiments, a NLS comprises the amino acid sequence PKKKRKV (SEQ ID NO: 16) or MDSLLMNRRKFLYQFKNVRWAKGRRETYLC (SEQ ID NO: 17).

### Nucleic Acid Molecule

[0280] The term “nucleic acid,” as used herein, refers to a polymer of nucleotides. The polymer may include natural nucleosides (i.e., adenosine, thymidine, guanosine, cytidine, uridine, deoxyadenosine, deoxythymidine, deoxyguanosine, and deoxycytidine), nucleoside analogs (e.g., 2-aminoadenosine, 2-thiothymidine, inosine, pyrrolo-pyrimidine, 3-methyl adenosine, 5-methylcytidine, C5 bromouridine, C5 fluorouridine, C5 iodouridine, C5 propynyl uridine, C5 propynyl cytidine, C5 methylcytidine, 7 deazaadenosine, 7 deazaguanosine, 8 oxoadenosine, 8 oxoguanosine, O(6) methylguanine, 4-acetylcytidine, 5-(carboxyhydroxymethyl)uridine, dihydrouridine, methylpseudouridine, 1-methyl adenosine, 1-methyl guanosine, N6-methyl adenosine, and 2-thiocytidine), chemically modified bases, biologically modified bases (e.g., methylated bases), intercalated bases, modified sugars (e.g., 2′-fluororibose, ribose, 2′-deoxyribose, 2′-O-methylcytidine, arabinose, and hexose), or modified phosphate groups (e.g., phosphorothioates and 5′ N phosphoramidite linkages).

### PEgRNA

[0281] As used herein, the terms “prime editing guide RNA” or “PEgRNA” or “extended guide RNA” refer to a specialized form of a guide RNA that has been modified to include one or more additional sequences for implementing the prime editing methods and compositions described herein. As described herein, the prime editing guide RNA comprise one or more “extended regions” of nucleic acid sequence. The extended regions may comprise, but are not limited to, single-stranded RNA or DNA. Further, the extended regions may occur at the 3′ end of a traditional guide RNA. In other arrangements, the extended regions may occur at the 5′ end of a traditional guide RNA. In still other arrangements, the extended region may occur at an intramolecular region of the traditional guide RNA, for example, in the gRNA core region which associates and/or binds to the napDNAbp. The extended region comprises a “DNA synthesis template” which encodes (by the polymerase of the prime editor) a single-stranded DNA which, in turn, has been designed to be (a) homologous with the endogenous target DNA to be edited, and (b) which comprises at least one desired nucleotide change (e.g., a transition, a transversion, a deletion, or an insertion) to be introduced or integrated into the endogenous target DNA. The extended region may also comprise other functional sequence elements, such as, but not limited to, a “primer binding site” and a “spacer or linker” sequence, or other structural elements, such as, but not limited to aptamers, stem loops, hairpins, toe loops (e.g., a 3′ toeloop), or an RNA-protein recruitment domain (e.g., MS2 hairpin). As used herein the “primer binding site” comprises a sequence that hybridizes to a single-strand DNA sequence having a 3′ end generated from the nicked DNA of the R-loop.

[0282] In certain embodiments, the PEgRNAs are represented by FIG. 3A, which shows a PEgRNA having a 5′ extension arm, a spacer, and a gRNA core. The 5′ extension further comprises in the 5′ to 3′ direction a reverse transcriptase template, a primer binding site, and a linker. As shown, the reverse transcriptase template may also be referred to more broadly as the “DNA synthesis template” where the polymerase of a prime editor described herein is not an RT, but another type of polymerase.

[0283] In certain other embodiments, the PEgRNAs are represented by FIG. 3B, which shows a PEgRNA having a 5′ extension arm, a spacer, and a gRNA core. The 5′ extension further comprises in the 5′ to 3′ direction a reverse transcriptase template, a primer binding site, and a linker. As shown, the reverse transcriptase template may also be referred to more broadly as the “DNA synthesis template” where the polymerase of a prime editor described herein is not an RT, but another type of polymerase.

[0284] In still other embodiments, the PEgRNAs are represented by FIG. 3D, which shows a PEgRNA having in the 5′ to 3′ direction a spacer (1), a gRNA core (2), and an extension arm (3). The extension arm (3) is at the 3′ end of the PEgRNA. The extension arm (3) further comprises in the 5′ to 3′ direction a “primer binding site” (A), an “edit template” (B), and a “homology arm” (C). The extension arm (3) may also comprise an optional modifier region at the 3′ and 5′ ends, which may be the same sequences or different sequences. In addition, the 3′ end of the PEgRNA may comprise a transcriptional terminator sequence. These sequence elements of the PEgRNAs are further described and defined herein.

[0285] In still other embodiments, the PEgRNAs are represented by FIG. 3E, which shows a PEgRNA having in the 5′ to 3′ direction an extension arm (3), a spacer (1), and a gRNA core (2). The extension arm (3) is at the 5′ end of the PEgRNA. The extension arm (3) further comprises in the 3′ to 5′ direction a “primer binding site” (A), an “edit template” (B), and a “homology arm” (C). The extension arm (3) may also comprise an optional modifier region at the 3′ and 5′ ends, which may be the same sequences or different sequences. The PEgRNAs may also comprise a transcriptional terminator sequence at the 3′ end. These sequence elements of the PEgRNAs are further described and defined herein.

### PE1

[0286] As used herein, “PE1” refers to a PE complex comprising a fusion protein comprising Cas9(H840A) and a wild type MMLV RT having the following structure: [NLS]-[Cas9(H840A)]-[linker]-[MMLV_RT(wt)]+a desired PEgRNA, wherein the PE fusion has the amino acid sequence of SEQ ID NO: 123, which is shown as follows;

(SEQ ID NO: 123)
MKRTADGSEFESPKKKRKVDKKYSIGLDIGTNSVGWAVITDEYKVPSKKFKVLGNTDRHSIK
KNLIGALLFDSGETAEATRLKRTARRRYTRRKNRICYLQEIFSNEMAKVDDSFFHRLEESFL
VEEDKKHERHPIFGNIVDEVAYHEKYPTIYHLRKKLVDSTDKADLRLIYLALAHMIKFRGHF
LIEGDLNPDNSDVDKLFIQLVQTYNQLFEENPINASGVDAKAILSARLSKSRRLENLIAQLPG
EKKNGLFGNLIALSLGLTPNFKSNFDLAEDAKLQLSKDTYDDDLDNLLAQIGDQYADLFLA
AKNLSDAILLSDILRVNTEITKAPLSASMIKRYDEHHQDLTLLKALVRQQLPEKYKEIFFDQS
KNGYAGYIDGGASQEEFYKFIKPILEKMDGTEELLVKLNREDLLRKQRTFDNGSIPHQIHLG
ELHAILRRQEDFYPFLKDNREKIEKILTFRIPYYVGPLARGNSRFAWMTRKSEETITPWNFEE
VVDKGASAQSFIERMTNFDKNLPNEKVLPKHSLLYEYFTVYNELTKVKYVTEGMRKPAFLS
GEQKKAIVDLLFKTNRKVTVKQLKEDYFKKIECFDSVEISGVEDRFNASLGTYHDLLKIIKD
KDFLDNEENEDILEDIVLTLTLFEDREMIEERLKTYAHLFDDKVMKQLKRRRYTGWGRLSR
KLINGIRDKQSGKTILDFLKSDGFANRNFMQLIHDDSLTFKEDIQKAQVSGQGDSLHEHIAN
LAGSPAIKKGILQTVKVVDELVKVMGRHKPENIVIEMARENQTTQKGQKNSRERMKRIEE
GIKELGSQILKEHPVENTQLQNEKLYLYYLQNGRDMYVDQELDINRLSDYDVDAIVPQSFL
KDDSIDNKVLTRSDKNRGKSDNVPSEEVVKKMKNYWRQLLNAKLITQRKFDNLTKAERGG
LSELDKAGFIKRQLVETRQITKHVAQILDSRMNTKYDENDKLIREVKVITLKSKLVSDFRKD
FQFYKVREINNYHHAHDAYLNAVVGTALIKKYPKLESEFVYGDYKVYDVRKMIAKSEQEIG
KATAKYFFYSNIMNFFKTEITLANGEIRKRPLIETNGETGEIVWDKGRDFATVRKVLSMPQV
NIVKKTEVQTGGFSKESILPKRNSDKLIARKKDWDPKKYGGFDSPTVAYSVLVVAKVEKGK
SKKLKSVKELLGITIMERSSFEKNPIDFLEAKGYKEVKKDLIIKLPKYSLFELENGRKRMLA
SAGELQKGNELALPSKYVNFLYLASHYEKLKGSPEDNEQKQLFVEQHKHYLDEIIEQISEFS
KRVILADANLDKVLSAYNKHRDKPIREQAENIIHLFTLTNLGAPAAFKYFDTTIDRKRYTSTK
EVLDATLIHQSITGLYETRIDLSQLGGDSGGSSGGSSGSETPGTSESATPESSGGSSGGSSTLNI
EDEYRLHETSKEPDVSLGSTWLSDFPQAWAETGGMGLAVRQAPLIIPLKATSTPVSIKQYPMSQEARLGI
KPHIQRLLDQGILVPCQSPWNTPLLPVKKPGTNDYRPVQDLREVNKRVEDIHPTVPNPYNLLSGLPPSH
QWYTVLDLKDAFFCLRLHPTSQPLFAFEWRDPEMGISGQLTWTRLPQGFKNSPTLFDEALHRDLADF
RIQHPDLILLQYVDDLLLAATSELDCQQGTRALLQTLGNLGYRASAKKAQICQKQVKYLGYLLKEGQR
WLTEARKETVMGQPTPKTPRQLREFLGTAGFCRLWIPGFAEMAAPLYPLTKTGTLFNWGPDQQKAYQ
EIKQALLTAPALGLPDLTKPFELFVDEKQGYAKGVLTQKLGPWRRPVAYLSKKLDPVAAGWPPCLRMV
AAIAVLTKDAGKLTMGQPLVILAPHAVEALVKQPPDRWLSNARMTHYQALLLDTDRVQFGPWALNPAT
LLPLPEEGLQHNCLDILAEAHGTRPDLTDQPLPDADHTWYTDGSSLLQEGQRKAGAAVFFETEVIWAK
ALPAGTSAQRAELIALTQALKMAEGKKLNVYTDSRYAFATAHIHGEIYRRRGLLTSEGKEIKNKDEILALL
KALFLPKRLSIIHCPGHQKGHSAEARGNRMADQAARKAAITETPDTSTLLIENSSPSGGSKRTADGSEF
EPKKKRKV

KEY:
NUCLEAR LOCALIZATION SEQUENCE (NLS) TOP: (SEQ ID NO: 124), BOTTOM: (SEQ ID NO: 133)
CAS9(H840A) (SEQ ID NO: 126)
33-AMINO ACID LINKER (SEQ ID NO: 127)
M-MLV reverse transcriptase (SEQ ID NO: 128).

### PE2

[0287] As used herein, “PE2” refers to a PE complex comprising a fusion protein comprising Cas9(H840A) and a variant MMLV RT having the following structure: [NLS]-[Cas9(H840A)]-[linker]-[MMLV_RT(D200N)(T330P)(L603W)(T306K)(W313F)]+a desired PEgRNA, wherein the PE fusion has the amino acid sequence of SEQ ID NO: 134, which is shown as follows:

(SEQ ID NO: 134)
MKRTADGSEFESPKKKRKVDKKYSIGLDIGTNSVGWAVITDEYKVPSKKFKVLGNTDRHSIK
KNLIGALLFDSGETAEATRLKRTARRRYTRRKNRICYLQEIFSNEMAKVDDSFFHRLEESFL
VEEDKKHERHPIFGNIVDEVAYHEKYPTIYHLRKKLVDSTDKADLRLIYLALAHMIKFRGHF
LIEGDLNPDNSDVDKLFIQLVQTYNQLFEENPINASGVDAKAILSARLSKSRRLENLIAQLPG
EKKNGLFGNLIALSLGLTPNFKSNFDLAEDAKLQLSKDTYDDDLDNLLAQIGDQYADLFLA
AKNLSDAILLSDILRVNTEITKAPLSASMIKRYDEHHQDLTLLKALVRQQLPEKYKEIFFDQS
KNGYAGYIDGGASQEEFYKFIKPILEKMDGTEELLVKLNREDLLRKQRTFDNGSIPHQIHLG
ELHAILRRQEDFYPFLKDNREKIEKILTFRIPYYVGPLARGNSRFAWMTRKSEETITPWNFEE
VVDKGASAQSFIERMTNFDKNLPNEKVLPKHSLLYEYFTVYNELTKVKYVTEGMRKPAFLS
GEQKKAIVDLLFKTNRKVTVKQLKEDYFKKIECFDSVEISGVEDRFNASLGTYHDLLKIIKD
KDFLDNEENEDILEDIVLTLTLFEDREMIEERLKTYAHLFDDKVMKQLKRRRYTGWGRLSR
KLINGIRDKQSGKTILDFLKSDGFANRNFMQLIHDDSLTFKEDIQKAQVSGQGDSLHEHIAN
LAGSPAIKKGILQTVKVVDELVKVMGRHKPENIVIEMARENQTTQKGQKNSRERMKRIEE
GIKELGSQILKEHPVENTQLQNEKLYLYYLQNGRDMYVDQELDINRLSDYDVDAIVPQSFL
KDDSIDNKVLTRSDKNRGKSDNVPSEEVVKKMKNYWRQLLNAKLITQRKFDNLTKAERGG
LSELDKAGFIKRQLVETRQITKHVAQILDSRMNTKYDENDKLIREVKVITLKSKLVSDFRKD
FQFYKVREINNYHHAHDAYLNAVVGTALIKKYPKLESEFVYGDYKVYDVRKMIAKSEQEIG
KATAKYFFYSNIMNFFKTEITLANGEIRKRPLIETNGETGEIVWDKGRDFATVRKVLSMPQV
NIVKKTEVQTGGFSKESILPKRNSDKLIARKKDWDPKKYGGFDSPTVAYSVLVVAKVEKGK
SKKLKSVKELLGITIMERSSFEKNPIDFLEAKGYKEVKKDLIIKLPKYSLFELENGRKRMLA
SAGELQKGNELALPSKYVNFLYLASHYEKLKGSPEDNEQKQLFVEQHKHYLDEIIEQISEFS
KRVILADANLDKVLSAYNKHRDKPIREQAENIIHLFTLTNLGAPAAFKYFDTTIDRKRYTSTK
EVLDATLIHQSITGLYETRIDLSQLGGDSGGSSGGSSGSETPGTSESATPESSGGSSGGSSTLNI
EDEYRLHETSKEPDVSLGSTWLSDFPQAWAETGGMGLAVRQAPLnPLKATSTPVSIKQYPMSQEARLGI
KPHIQRLLDQGILVPCQSPWNTPLLPVKKPGTNDYRPVQDLREVNKRVEDIHPTVPNPYNLLSGLPPSH
QWYTVLDLKDAFFCLRLHPTSQPLFAFEWRDPEMGISGQLTWTRLPQGFKNSPTLFNEALHRDLADF
RIQHPDLILLQYVDDLLLAATSELDCQQGTRALLQTLGNLGYRASAKKAQICQKQVKYLGYLLKEGQR
WLTEARKETVMGQPTPKTPRQLREFLGKAGFCRLFIPGFAEMAAPLYPLTKPGTLFNWGPDQQKAYQ
EIKQALLTAPALGLPDLTKPFELFVDEKQGYAKGVLTQKLGPWRRPVAYLSKKLDPVAAGWPPCLRMV
AAIAVLTKDAGKLTMGQPLVILAPHAVEALVKQPPDRWLSNARMTHYQALLLDTDRVQFGPWALNPAT
LLPLPEEGLQHNCLDILAEAHGTRPDLTDQPLPDADHTWYTDGSSLLQEGQRKAGAAVFTETEVIWAK
ALPAGTSAQRAELIALTQALKMAEGKKLNVYTDSRYAFATAHIHGEIYRRRGWLTSEGKEIKNKDEILALL
KALFLPKRLSIIHCPGHQKGHSAEARGNRMADQAARKAAITETPDTSTLLIENSSPSGGSKRTADGSEF
EPKKKRKV

KEY:
NUCLEAR LOCALIZATION SEQUENCE (NLS) TOP: (SEQ ID NO: 124), BOTTOM: (SEQ ID NO: 133)
CAS9(H840A) (SEQ ID NO: 137)
33-AMINO ACID LINKER (SEQ ID NO: 127)
M-MLV reverse transcriptase (SEQ ID NO: 139).

### PE3

[0288] As used herein, “PE3” refers to PE2 plus a second-strand nicking guide RNA that complexes with the PE2 and introduces a nick in the non-edited DNA strand in order to induce preferential replacement of the edited strand.

### PE3b

[0289] As used herein, “PE3b” refers to PE3 but wherein the second-strand nicking guide RNA is designed for temporal control such that the second strand nick is not introduced until after the installation of the desired edit. This is achieved by designing a gRNA with a spacer sequence that matches only the edited strand, but not the original allele. Using this strategy, referred to hereafter as PE3b, mismatches between the protospacer and the unedited allele should disfavor nicking by the sgRNA until after the editing event on the PAM strand takes place.

### PE-Short

[0290] As used herein, “PE-short” refers to a PE construct that is fused to a C-terminally truncated reverse transcriptase, and has the following amino acid sequence:

(SEQ ID NO: 765)
MKRTADGSEFESPKKKRKVDKKYSIGLDIGTNSVGWAVITDEYKVPSKKFKVLGNTDRHSIK
KNLIGALLFDSGETAEATRLKRTARRRYTRRKNRICYLQEIFSNEMAKVDDSFFHRLEESFL
VEEDKKHERHPIFGNIVDEVAYHEKYPTIYHLRKKLVDSTDKADLRLIYLALAHMIKFRGH
FLIEGDLNPDNSDVDKLFIQLVQTYNQLFEENPINASGVDAKAILSARLSKSRRLENLIAQLP
GEKKNGLFGNLIALSLGLTPNFKSNFDLAEDAKLQLSKDTYDDDLDNLLAQIGDQYADLFL
AAKNLSDAILLSDILRVNTEITKAPLSASMIKRYDEHHQDLTLLKALVRQQLPEKYKEIFFD
QSKNGYAGYIDGGASQEEFYKFIKPILEKMDGTEELLVKLNREDLLRKQRTFDNGSIPHQIH
LGELHAILRRQEDFYPFLKDNREKIEKILTFRIPYYVGPLARGNSRFAWMTRKSEETITPWN
FEEVVDKGASAQSFIERMTNFDKNLPNEKVLPKHSLLYEYFTVYNELTKVKYVTEGMRKP
AFLSGEQKKAIVDLLFKTNRKVTVKQLKEDYFKKIECFDSVEISGVEDRFNASLGTYHDLL
KIIKDKDFLDNEENEDILEDIVLTLTLFEDREMIEERLKTYAHLFDDKVMKQLKRRRYTGW
GRLSRKLINGIRDKQSGKTILDFLKSDGFANRNFMQLIHDDSLTFKEDIQKAQVSGQGDSLH
EHIANLAGSPAIKKGILQTVKVVDELVKVMGRHKPENIVIEMARENQTTQKGQKNSRERM
KRIEEGIKELGSQILKEHPVENTQLQNEKLYLYYLQNGRDMYVDQELDINRLSDYDVDAIV
PQSFLKDDSIDNKVLTRSDKNRGKSDNVPSEEVVKKMKNYWRQLLNAKLITQRKFDNLTK
AERGGLSELDKAGFIKRQLVETRQITKHVAQILDSRMNTKYDENDKLIREVKVITLKSKLVS
DFRKDFQFYKVREINNYHHAHDAYLNAVVGTALIKKYPKLESEFVYGDYKVYDVRKMIAK
SEQEIGKATAKYFFYSNIMNFFKTEITLANGEIRKRPLIETNGETGEIVWDKGRDFATVRKV
LSMPQVNIVKKTEVQTGGFSKESILPKRNSDKLIARKKDWDPKKYGGFDSPTVAYSVLVVA
KVEKGKSKKLKSVKELLGITIMERSSFEKNPIDFLEAKGYKEVKKDLIIKLPKYSLFELENG
RKRMLASAGELQKGNELALPSKYVNFLYLASHYEKLKGSPEDNEQKQLFVEQHKHYLDEI
lEQISEFSKRVILADANLDKVLSAYNKHRDKPIREQAENIIHLFTLTNLGAPAAFKYFDTTIDR
KRYTSTKEVLDATLIHOSITGLYETRIDLSOLGGDSGGSSGGSSGSETPGTSESATPESSGGSS
GGSSTLNIEDEYRLHETSKEPDVSLGSTWLSDFPQAWAETGGMGLAVRQAPLHPLKATSTPVSIKQYP
MSQEARLGIKPHIQRLLDQGILVPCQSPWNTPLLPVKKPGTNDYRPVQDLREVNKRVEDIHPTVPNPY
NLLSGLPPSHQWYTVLDLKDAFFCLRLHPTSQPLFAFEWRDPEMGISGQLTWTRLPQGFKNSPTLFNE
ALHRDLADFRIQHPDLILLQYVDDLLLAATSELDCQQGTRALLQTLGNLGYRASAKKAQICQKQVKYL
GYLLKEGQRWLTEARKETVMGQPTPKTPRQLREFLGKAGFCRLFIPGFAEMAAPLYPLTKPGTLFNW
GPDQQKAYQEIKQALLTAPALGLPDLTKPFELFVDEKQGYAKGVLTQKLGPWRRPVAYLSKKLDPVA
AGWPPCLRMVAAIAVLTKDAGKLTMGQPLVILAPHAVEALVKQPPDRWLSNARMTHYQALLLDTDRV
QFGPWALNPATLLPLPEEGLQHNCLDNSRLINSGGSKRTADGSEFEPKKKRKV

KEY:
NUCLEAR LOCALIZATION SEQUENCE (NLS) TOP: (SEQ ID NO: 124), BOTTOM: (SEQ ID NO: 133)
CAS9(H840A) (SEQ ID NO: 157)
33-AMINO ACID LINKER 1 (SEQ ID NO: 127)
M-MLV TRUNCATED REVERSE TRANSCRIPTASE (SEQ ID NO: 766)

### Peptide Tag

[0291] The term “peptide tag” refers to a peptide amino acid sequence that is genetically fused to a protein sequence to impart one or more functions onto the proteins that facilitate the manipulation of the protein for various purposes, such as, visualization, purification, solubilization, and separation, etc. Peptide tags can include various types of tags categorized by purpose or function, which may include “affinity tags” (to facilitate protein purification), “solubilization tags” (to assist in proper folding of proteins), “chromatography tags” (to alter chromatographic properties of proteins), “epitope tags” (to bind to high affinity antibodies), “fluorescence tags” (to facilitate visualization of proteins in a cell or in vitro).

### Polymerase

[0292] As used herein, the term “polymerase” refers to an enzyme that synthesizes a nucleotide strand and that may be used in connection with the prime editor systems described herein. The polymerase can be a “template-dependent” polymerase (i.e., a polymerase that synthesizes a nucleotide strand based on the order of nucleotide bases of a template strand). The polymerase can also be a “template-independent” polymerase (i.e., a polymerase that synthesizes a nucleotide strand without the requirement of a template strand). A polymerase may also be further categorized as a “DNA polymerase” or an “RNA polymerase.” In various embodiments, the prime editor system comprises a DNA polymerase. In various embodiments, the DNA polymerase can be a “DNA-dependent DNA polymerase” (i.e., whereby the template molecule is a strand of DNA). In such cases, the DNA template molecule can be a PEgRNA, wherein the extension arm comprises a strand of DNA. In such cases, the PEgRNA may be referred to as a chimeric or hybrid PEgRNA which comprises an RNA portion (i.e., the guide RNA components, including the spacer and the gRNA core) and a DNA portion (i.e., the extension arm). In various other embodiments, the DNA polymerase can be an “RNA-dependent DNA polymerase” (i.e., whereby the template molecule is a strand of RNA). In such cases, the PEgRNA is RNA, i.e., including an RNA extension. The term “polymerase” may also refer to an enzyme that catalyzes the polymerization of nucleotide (i.e., the polymerase activity). Generally, the enzyme will initiate synthesis at the 3′-end of a primer annealed to a polynucleotide template sequence (e.g., such as a primer sequence annealed to the primer binding site of a PEgRNA) and will proceed toward the 5′ end of the template strand. A “DNA polymerase” catalyzes the polymerization of deoxynucleotides. As used herein in reference to a DNA polymerase, the term DNA polymerase includes a “functional fragment thereof”. A “functional fragment thereof” refers to any portion of a wild-type or mutant DNA polymerase that encompasses less than the entire amino acid sequence of the polymerase and which retains the ability, under at least one set of conditions, to catalyze the polymerization of a polynucleotide. Such a functional fragment may exist as a separate entity, or it may be a constituent of a larger polypeptide, such as a fusion protein.

Prime editing and multi-flap prime editing

[0293] As used herein, the term “prime editing” or “classical prime editing” refers to an approach for gene editing using napDNAbps, a polymerase (e.g., a reverse transcriptase), and specialized guide RNAs that include a DNA synthesis template for encoding desired new genetic information (or deleting genetic information) that is then incorporated into a target DNA sequence. Certain embodiments of prime editing are described in the embodiments of FIGS. 1A-1H and FIG. 72(a)-72(c), among other figures. Classical prime editing is described in the inventors publication of Anzalone, A. V. et al. Search-and-replace genome editing without double-strand breaks or donor DNA. Nature 576, 149-157 (2019), which is incorporated herein by reference in its entirety.

[0294] Prime editing represents a platform for genome editing that is a versatile and precise genome editing method that directly writes new genetic information into a specified DNA site using a nucleic acid programmable DNA binding protein (“napDNAbp”) working in association with a polymerase (i.e., in the form of a fusion protein or otherwise provided in trans with the napDNAbp), wherein the prime editing system is programmed with a prime editing (PE) guide RNA (“PEgRNA”) that both specifies the target site and templates the synthesis of the desired edit in the form of a replacement DNA strand by way of an extension (either DNA or RNA) engineered onto a guide RNA (e.g., at the 5′ or 3′ end, or at an internal portion of a guide RNA). The replacement strand containing the desired edit (e.g., a single nucleobase substitution) shares the same (or is homologous to) sequence as the endogenous strand (immediately downstream of the nick site) of the target site to be edited (with the exception that it includes the desired edit). Through DNA repair and/or replication machinery, the endogenous strand downstream of the nick site is replaced by the newly synthesized replacement strand containing the desired edit. In some cases, prime editing may be thought of as a “search-and-replace” genome editing technology since the prime editors, as described herein, not only search and locate the desired target site to be edited, but at the same time, encode a replacement strand containing a desired edit which is installed in place of the corresponding target site endogenous DNA strand. The prime editors of the present disclosure relate, in part, to the discovery that the mechanism of target-primed reverse transcription (TPRT) or “prime editing” can be leveraged or adapted for conducting precision CRISPR/Cas-based genome editing with high efficiency and genetic flexibility (e.g., as depicted in various embodiments of FIGS. 1A-1F). TPRT is naturally used by mobile DNA elements, such as mammalian non-LTR retrotransposons and bacterial Group II introns^{28,29}. The inventors have herein used Cas protein-reverse transcriptase fusions or related systems to target a specific DNA sequence with a guide RNA, generate a single strand nick at the target site, and use the nicked DNA as a primer for reverse transcription of an engineered reverse transcriptase template that is integrated with the guide RNA. However, while the concept begins with prime editors that use reverse transcriptase as the DNA polymerase component, the prime editors described herein are not limited to reverse transcriptases but may include the use of virtually any DNA polymerase. Indeed, while the application throughout may refer to prime editors with “reverse transcriptases,” it is set forth here that reverse transcriptases are only one type of DNA polymerase that may work with prime editing. Thus, whereever the specification mentions a “reverse transcriptase,” the person having ordinary skill in the art should appreciate that any suitable DNA polymerase may be used in place of the reverse transcriptase. Thus, in one aspect, the prime editors may comprise Cas9 (or an equivalent napDNAbp) which is programmed to target a DNA sequence by associating it with a specialized guide RNA (i.e., PEgRNA) containing a spacer sequence that anneals to a complement of a protospacer in the target DNA. The specialized guide RNA also contains new genetic information in the form of an extension that encodes a replacement strand of DNA containing a desired genetic alteration which is used to replace a corresponding endogenous DNA strand at the target site. To transfer information from the PEgRNA to the target DNA, the mechanism of prime editing involves nicking the target site in one strand of the DNA to expose a 3′-hydroxyl group. The exposed 3′-hydroxyl group can then be used to prime the DNA polymerization of the edit-encoding extension on PEgRNA directly into the target site. In various embodiments, the extension—which provides the template for polymerization of the replacement strand containing the edit—can be formed from RNA or DNA. In the case of an RNA extension, the polymerase of the prime editor can be an RNA-dependent DNA polymerase (such as, a reverse transcriptase). In the case of a DNA extension, the polymerase of the prime editor may be a DNA-dependent DNA polymerase. The newly synthesized strand (i.e., the replacement DNA strand containing the desired edit) that is formed by the herein disclosed prime editors would be homologous to the genomic target sequence (i.e., have the same sequence as) except for the inclusion of a desired nucleotide change (e.g., a single nucleotide change, a deletion, or an insertion, or a combination thereof). The newly synthesized (or replacement) strand of DNA may also be referred to as a single strand DNA flap, which would compete for hybridization with the complementary homologous endogenous DNA strand, thereby displacing the corresponding endogenous strand. In certain embodiments, the system can be combined with the use of an error-prone reverse transcriptase enzyme (e.g., provided as a fusion protein with the Cas9 domain, or provided in trans to the Cas9 domain). The error-prone reverse transcriptase enzyme can introduce alterations during synthesis of the single strand DNA flap. Thus, in certain embodiments, error-prone reverse transcriptase can be utilized to introduce nucleotide changes to the target DNA. Depending on the error-prone reverse transcriptase that is used with the system, the changes can be random or non-random. Resolution of the hybridized intermediate (comprising the single strand DNA flap synthesized by the reverse transcriptase hybridized to the endogenous DNA strand) can include removal of the resulting displaced flap of endogenous DNA (e.g., with a 5′ end DNA flap endonuclease, FEN1), ligation of the synthesized single strand DNA flap to the target DNA, and assimilation of the desired nucleotide change as a result of cellular DNA repair and/or replication processes. Because templated DNA synthesis offers single nucleotide precision for the modification of any nucleotide, including insertions and deletions, the scope of this approach is very broad and could foreseeably be used for myriad applications in basic science and therapeutics.

[0295] In various embodiments, prime editing operates by contacting a target DNA molecule (for which a change in the nucleotide sequence is desired to be introduced) with a nucleic acid programmable DNA binding protein (napDNAbp) complexed with a prime editing guide RNA (PEgRNA). In reference to FIG. 1G, the prime editing guide RNA (PEgRNA) comprises an extension at the 3′ or 5′ end of the guide RNA, or at an intramolecular location in the guide RNA and encodes the desired nucleotide change (e.g., single nucleotide change, insertion, or deletion). In step (a), the napDNAbp/extended gRNA complex contacts the DNA molecule and the extended gRNA guides the napDNAbp to bind to a target locus. In step (b), a nick in one of the strands of DNA of the target locus is introduced (e.g., by a nuclease or chemical agent), thereby creating an available 3′ end in one of the strands of the target locus. In certain embodiments, the nick is created in the strand of DNA that corresponds to the R-loop strand, i.e., the strand that is not hybridized to the guide RNA sequence, i.e., the “non-target strand.” The nick, however, could be introduced in either of the strands. That is, the nick could be introduced into the R-loop “target strand” (i.e., the strand hybridized to the protospacer of the extended gRNA) or the “non-target strand” (i.e., the strand forming the single-stranded portion of the R-loop and which is complementary to the target strand). In step (c), the 3′ end of the DNA strand (formed by the nick) interacts with the extended portion of the guide RNA in order to prime reverse transcription (i.e., “target-primed RT”). In certain embodiments, the 3′ end DNA strand hybridizes to a specific RT priming sequence on the extended portion of the guide RNA, i.e., the “reverse transcriptase priming sequence” or “primer binding site” on the PEgRNA. In step (d), a reverse transcriptase (or other suitable DNA polymerase) is introduced which synthesizes a single strand of DNA from the 3′ end of the primed site towards the 5′ end of the prime editing guide RNA. The DNA polymerase (e.g., reverse transcriptase) can be fused to the napDNAbp or alternatively can be provided in trans to the napDNAbp. This forms a single-strand DNA flap comprising the desired nucleotide change (e.g., the single base change, insertion, or deletion, or a combination thereof) and which is otherwise homologous to the endogenous DNA at or adjacent to the nick site. In step (e), the napDNAbp and guide RNA are released. Steps (f) and (g) relate to the resolution of the single strand DNA flap such that the desired nucleotide change becomes incorporated into the target locus. This process can be driven towards the desired product formation by removing the corresponding 5′ endogenous DNA flap that forms once the 3′ single strand DNA flap invades and hybridizes to the endogenous DNA sequence. Without being bound by theory, the cells endogenous DNA repair and replication processes resolves the mismatched DNA to incorporate the nucleotide change(s) to form the desired altered product. The process can also be driven towards product formation with “second strand nicking,” as exemplified in FIG. 1F. This process may introduce at least one or more of the following genetic changes: transversions, transitions, deletions, and insertions.

[0296] The term “prime editor (PE) system” or “prime editor (PE)” or “PE system” or “PE editing system” refers the compositions involved in the method of genome editing using target-primed reverse transcription (TPRT) describe herein, including, but not limited to the napDNAbps, reverse transcriptases, fusion proteins (e.g., comprising napDNAbps and reverse transcriptases), prime editing guide RNAs, and complexes comprising fusion proteins and prime editing guide RNAs, as well as accessory elements, such as second strand nicking components (e.g., second strand sgRNAs) and 5′ endogenous DNA flap removal endonucleases (e.g., FEN1) for helping to drive the prime editing process towards the edited product formation.

[0297] Although in the embodiments described thus far the PEgRNA constitutes a single molecule comprising a guide RNA (which itself comprises a spacer sequence and a gRNA core or scaffold) and a 5′ or 3′ extension arm comprising the primer binding site and a DNA synthesis template (e.g., see FIG. 3D, the PEgRNA may also take the form of two individual molecules comprised of a guide RNA and a trans prime editor RNA template (tPERT), which essentially houses the extension arm (including, in particular, the primer binding site and the DNA synthesis domain) and an RNA-protein recruitment domain (e.g., MS2 aptamer or hairpin) in the same molecule which becomes co-localized or recruited to a modified prime editor complex that comprises a tPERT recruiting protein (e.g., MS2cp protein, which binds to the MS2 aptamer). See FIG. 3G and FIG. 3H as an example of a tPERT that may be used with prime editing.

[0298] In the “dual-flap prime editing system”, two pegRNAs are used to target opposite strands of a genomic site and direct the synthesis of two complementary 3′ flaps containing edited DNA sequence (FIG. 91). Unlike classical prime editing, there is no requirement for the pair of edited DNA strands (3′ flaps) to directly compete with 5′ flaps in endogenous genomic DNA, as the complementary edited strand is available for hybridization instead. Since both strands of the duplex are synthesized as edited DNA, the dual-flap prime editing system obviates the need for the replacement of the non-edited complementary DNA strand required by classical prime editing. Instead, cellular DNA repair machinery need only excise the paired 5′ flaps (original genomic DNA) and ligate the paired 3′ flaps (edited DNA) into the locus. Therefore, there is also no need to include sequences homologous to genomic DNA in the newly synthesized DNA strands, allowing selective hybridization of the new strands and facilitating edits that contain minimal genomic homology. Nuclease-active versions of prime editors that cut both strands of DNA could also be used to accelerate the removal of the original DNA sequence.

[0299] Like classical prime editing, multi-flap prime editing (including dual-flap and quadruple-flap prime editing) is a versatile and precise genome editing method that directly writes new genetic information into a specified DNA site using a nucleic acid programmable DNA binding protein (“napDNAbp”) working in association with a polymerase (i.e., in the form of a fusion protein or otherwise provided in trans with the napDNAbp), wherein the prime editing system is programmed with a prime editing (PE) guide RNA (“PEgRNA”) that both specifies the target site and templates the synthesis of the desired edit in the form of a replacement DNA strand by way of an extension (either DNA or RNA) engineered onto a guide RNA (e.g., at the 5′ or 3′ end, or at an internal portion of a guide RNA). The replacement strand containing the desired edit (e.g., a single nucleobase substitution) shares the same sequence as the endogenous strand of the target site to be edited (with the exception that it includes the desired edit). Through DNA repair and/or replication machinery, the endogenous strand of the target site is replaced by the newly synthesized replacement strand containing the desired edit. In some cases, prime editing may be thought of as a “search-and-replace” genome editing technology since the prime editors, as described herein, not only search and locate the desired target site to be edited, but at the same time, encode a replacement strand containing a desired edit which is installed in place of the corresponding target site endogenous DNA strand.

### Prime Editor

[0300] The dual prime editing system described herein comprises a pair of prime editors. The term “prime editor” refers to the herein described fusion constructs comprising a napDNAbp (e.g., Cas9 nickase) and a reverse transcriptase and is capable of carrying out prime editing on a target nucleotide sequence in the presence of a PEgRNA (or “extended guide RNA”). The term “prime editor” may refer to the fusion protein or to the fusion protein complexed with a PEgRNA, and/or further complexed with a second-strand nicking sgRNA. In some embodiments, the prime editor may also refer to the complex comprising a fusion protein (reverse transcriptase fused to a napDNAbp), a PEgRNA, and a regular guide RNA capable of directing the second-site nicking step of the non-edited strand as described herein. In other embodiments, the reverse transcriptase component of the “primer editor” may be provided in trans.

[0301] The dual-flap prime editing system described herein comprises a pair of prime editors. The quadruple-flap prime editing system described herein comprises four prime editors.

### Primer Binding Site

[0302] The term “primer binding site” or “the PBS” refers to the nucleotide sequence located on a PEgRNA as a component of the extension arm (typically at the 3′ end of the extension arm) and serves to bind to the primer sequence that is formed after Cas9 nicking of the target sequence by the prime editor. As detailed elsewhere, when the Cas9 nickase component of a prime editor nicks one strand of the target DNA sequence, a 3′-ended ssDNA flap is formed, which serves a primer sequence that anneals to the primer binding site on the PEgRNA to prime reverse transcription.

### Promoter

[0303] The term “promoter” is art-recognized and refers to a nucleic acid molecule with a sequence recognized by the cellular transcription machinery and able to initiate transcription of a downstream gene. A promoter can be constitutively active, meaning that the promoter is always active in a given cellular context, or conditionally active, meaning that the promoter is only active in the presence of a specific condition. For example, a conditional promoter may only be active in the presence of a specific protein that connects a protein associated with a regulatory element in the promoter to the basic transcriptional machinery, or only in the absence of an inhibitory molecule. A subclass of conditionally active promoters are inducible promoters that require the presence of a small molecule “inducer” for activity. Examples of inducible promoters include, but are not limited to, arabinose-inducible promoters, Tet-on promoters, and tamoxifen-inducible promoters. A variety of constitutive, conditional, and inducible promoters are well known to the skilled artisan, and the skilled artisan will be able to ascertain a variety of such promoters useful in carrying out the instant invention, which is not limited in this respect.

### Protospacer

[0304] As used herein, the term “protospacer” refers to the sequence (-20 bp) in DNA adjacent to the PAM (protospacer adjacent motif) sequence. The protospacer shares the same sequence as the spacer sequence of the guide RNA. The guide RNA anneals to the complement of the protospacer sequence on the target DNA (specifically, one strand thereof, i.e., the “target strand” versus the “non-target strand” of the target DNA sequence). In order for Cas9 to function it also requires a specific protospacer adjacent motif (PAM) that varies depending on the bacterial species of the Cas9 gene. The most commonly used Cas9 nuclease, derived from S. pyogenes, recognizes a PAM sequence of NGG that is found directly downstream of the target sequence in the genomic DNA, on the non-target strand. The skilled person will appreciate that the literature in the state of the art sometimes refers to the “protospacer” as the —20-nt target-specific guide sequence on the guide RNA itself, rather than referring to it as a “spacer.” Thus, in some cases, the term “protospacer” as used herein may be used interchangeably with the term “spacer.” The context of the description surrounding the appearance of either “protospacer” or “spacer” will help inform the reader as to whether the term is in reference to the gRNA or the DNA target.

### Protospacer Adjacent Motif (PAM)

[0305] As used herein, the term “protospacer adjacent sequence” or “PAM” refers to an approximately 2-6 base pair DNA sequence that is an important targeting component of a Cas9 nuclease. Typically, the PAM sequence is on either strand, and is downstream in the 5′ to 3′ direction of the Cas9 cut site. The canonical PAM sequence (i.e., the PAM sequence that is associated with the Cas9 nuclease of Streptococcus pyogenes or SpCas9) is 5′-NGG-3′ wherein “N” is any nucleobase followed by two guanine (“G”) nucleobases. Different PAM sequences can be associated with different Cas9 nucleases or equivalent proteins from different organisms. In addition, any given Cas9 nuclease, e.g., SpCas9, may be modified to alter the PAM specificity of the nuclease such that the nuclease recognizes alternative PAM sequence.

[0306] For example, with reference to the canonical SpCas9 amino acid sequence is SEQ ID NO: 18, the PAM sequence can be modified by introducing one or more mutations, including (a) D1135V, R1335Q, and T1337R “the VQR variant”, which alters the PAM specificity to NGAN or NGNG, (b) D1135E, R1335Q, and T1337R “the EQR variant”, which alters the PAM specificity to NGAG, and (c) D1135V, G1218R, R1335E, and T1337R “the VRER variant”, which alters the PAM specificity to NGCG. In addition, the D1135E variant of canonical SpCas9 still recognizes NGG, but it is more selective compared to the wild type SpCas9 protein.

[0307] It will also be appreciated that Cas9 enzymes from different bacterial species (i.e., Cas9 orthologs) can have varying PAM specificities. For example, Cas9 from Staphylococcus aureus (SaCas9) recognizes NGRRT or NGRRN. In addition, Cas9 from Neisseria meningitis (NmCas) recognizes NNNNGATT. In another example, Cas9 from Streptococcus thermophilis (StCas9) recognizes NNAGAAW. In still another example, Cas9 from Treponema denticola (TdCas) recognizes NAAAAC. These are examples and are not meant to be limiting. It will be further appreciated that non-SpCas9s bind a variety of PAM sequences, which makes them useful when no suitable SpCas9 PAM sequence is present at the desired target cut site. Furthermore, non-SpCas9s may have other characteristics that make them more useful than SpCas9. For example, Cas9 from Staphylococcus aureus (SaCas9) is about 1 kilobase smaller than SpCas9, so it can be packaged into adeno-associated virus (AAV). Further reference may be made to Shah et al., “Protospacer recognition motifs: mixed identities and functional diversity,” RNA Biology, 10(5): 891-899 (which is incorporated herein by reference).

### Recombinase

[0308] The term “recombinase,” as used herein, refers to a site-specific enzyme that mediates the recombination of DNA between recombinase recognition sequences, which results in the excision, integration, inversion, or exchange (e.g., translocation) of DNA fragments between the recombinase recognition sequences. Recombinases can be classified into two distinct families serine recombinases (e.g., resolvases and invertases) and tyrosine recombinases (e.g., integrases). Examples of serine recombinases include, without limitation, Hin, Gin, Tn3, β-six, CinH, ParA, γδ, Bxb1, ϕC31, TP901, TG1, φBT1, R4, φRV1, φFC1, MR11, A118, U153, and gp29. Examples of tyrosine recombinases include, without limitation, Cre, FLP, R, Lambda, HK101, HK022, and pSAM2. The serine and tyrosine recombinase names stem from the conserved nucleophilic amino acid residue that the recombinase uses to attack the DNA and which becomes covalently linked to the DNA during strand exchange. Recombinases have numerous applications, including the creation of gene knockouts/knock-ins and gene therapy applications. See, e.g., Brown et al., “Serine recombinases as tools for genome engineering.” Methods. 2011; 53(4):372-9; Hirano et al., “Site-specific recombinases as tools for heterologous gene integration.” Appl. Microbiol. Biotechnol. 2011; 92(2):227-39; Chavez and Calos, “Therapeutic applications of the ΦC31 integrase system.” Curr. Gene Ther. 2011; 11(5):375-81; Turan and Bode, “Site-specific recombinases: from tag-and-target- to tag-and-exchange-based genomic modifications.” FASEB J. 2011; 25(12):4088-107; Venken and Bellen, “Genome-wide manipulations of Drosophila melanogaster with transposons, Flp recombinase, and ΦC31 integrase.” Methods Mol. Biol. 2012; 859:203-28; Murphy, “Phage recombinases and their applications.” Adv. Virus Res. 2012; 83:367-414; Zhang et al., “Conditional gene manipulation: Cre-ating a new biological era.” J. Zhejiang Univ. Sci. B. 2012; 13(7):511-24; Karpenshif and Bernstein, “From yeast to mammals recent advances in genetic control of homologous recombination.” DNA Repair (Amst). 2012; 1; 11(10):781-8; the entire contents of each are hereby incorporated by reference in their entirety. The recombinases provided herein are not meant to be exclusive examples of recombinases that can be used in embodiments of the invention. The methods and compositions of the invention can be expanded by mining databases for new orthogonal recombinases or designing synthetic recombinases with defined DNA specificities (See, e.g., Groth et al., “Phage integrases: biology and applications.” J. Mol. Biol. 2004; 335, 667-678; Gordley et al., “Synthesis of programmable integrases.” Proc. Natl. Acad. Sci. USA. 2009; 106, 5053-5058; the entire contents of each are hereby incorporated by reference in their entirety). Other examples of recombinases that are useful in the methods and compositions described herein are known to those of skill in the art, and any new recombinase that is discovered or generated is expected to be able to be used in the different embodiments of the invention. In some embodiments, the catalytic domains of a recombinase are fused to a nuclease-inactivated RNA-programmable nuclease (e.g., dCas9, or a fragment thereof), such that the recombinase domain does not comprise a nucleic acid binding domain or is unable to bind to a target nucleic acid (e.g., the recombinase domain is engineered such that it does not have specific DNA binding activity). Recombinases lacking DNA binding activity and methods for engineering such are known, and include those described by Klippel et al., “Isolation and characterisation of unusual gin mutants.” EMBO J. 1988; 7: 3983-3989: Burke et al., “Activating mutations of Tn3 resolvase marking interfaces important in recombination catalysis and its regulation. Mol Microbiol. 2004; 51: 937-948; Olorunniji et al., “Synapsis and catalysis by activated Tn3 resolvase mutants.” Nucleic Acids Res. 2008; 36: 7181-7191; Rowland et al., “Regulatory mutations in Sin recombinase support a structure-based model of the synaptosome.” Mol Microbiol. 2009; 74: 282-298; Akopian et al., “Chimeric recombinases with designed DNA sequence recognition.” Proc Natl Acad Sci USA. 2003; 100: 8688-8691; Gordley et al., “Evolution of programmable zinc finger-recombinases with activity in human cells. J Mol Biol. 2007; 367: 802-813; Gordley et al., “Synthesis of programmable integrases.” Proc Natl Acad Sci USA. 2009; 106: 5053-5058; Arnold et al., “Mutants of Tn3 resolvase which do not require accessory binding sites for recombination activity.” EMBO J. 1999; 18: 1407-1414; Gaj et al., “Structure-guided reprogramming of serine recombinase DNA sequence specificity.” Proc Natl Acad Sci USA. 2011; 108(2):498-503; and Proudfoot et al., “Zinc finger recombinases with adaptable DNA sequence specificity.” PLoS One. 2011; 6(4):e19537; the entire contents of each are hereby incorporated by reference. For example, serine recombinases of the resolvase-invertase group, e.g., Tn3 and γδ resolvases and the Hin and Gin invertases, have modular structures with autonomous catalytic and DNA-binding domains (See, e.g., Grindley et al., “Mechanism of site-specific recombination.” Ann Rev Biochem. 2006; 75: 567-605, the entire contents of which are incorporated by reference). The catalytic domains of these recombinases are thus amenable to being recombined with nuclease-inactivated RNA-programmable nucleases (e.g., dCas9, or a fragment thereof) as described herein, e.g., following the isolation of ‘activated’ recombinase mutants which do not require any accessory factors (e.g., DNA binding activities) (See, e.g., Klippel et al., “Isolation and characterisation of unusual gin mutants.” EMBO J. 1988; 7: 3983-3989: Burke et al., “Activating mutations of Tn3 resolvase marking interfaces important in recombination catalysis and its regulation. Mol Microbiol. 2004; 51: 937-948; Olorunniji et al., “Synapsis and catalysis by activated Tn3 resolvase mutants.” Nucleic Acids Res. 2008; 36: 7181-7191; Rowland et al., “Regulatory mutations in Sin recombinase support a structure-based model of the synaptosome.” Mol Microbiol. 2009; 74: 282-298; Akopian et al., “Chimeric recombinases with designed DNA sequence recognition.” Proc Natl Acad Sci USA. 2003; 100: 8688-8691). Additionally, many other natural serine recombinases having an N-terminal catalytic domain and a C-terminal DNA binding domain are known (e.g., phiC31 integrase, TnpX transposase, IS607 transposase), and their catalytic domains can be co-opted to engineer programmable site-specific recombinases as described herein (See, e.g., Smith et al., “Diversity in the serine recombinases.” Mol Microbiol. 2002; 44: 299-307, the entire contents of which are incorporated by reference). Similarly, the core catalytic domains of tyrosine recombinases (e.g., Cre, λ integrase) are known, and can be similarly co-opted to engineer programmable site-specific recombinases as described herein (See, e.g., Guo et al., “Structure of Cre recombinase complexed with DNA in a site-specific recombination synapse.” Nature. 1997; 389:40-46; Hartung et al., “Cre mutants with altered DNA binding properties.” J Biol Chem 1998; 273:22884-22891; Shaikh et al., “Chimeras of the Flp and Cre recombinases: Tests of the mode of cleavage by Flp and Cre. J Mol Biol. 2000; 302:27-48; Rongrong et al., “Effect of deletion mutation on the recombination activity of Cre recombinase.” Acta Biochim Pol. 2005; 52:541-544; Kilbride et al., “Determinants of product topology in a hybrid Cre-Tn3 resolvase site-specific recombination system.” J Mol Biol. 2006; 355:185-195; Warren et al., “A chimeric cre recombinase with regulated directionality.” Proc Natl Acad Sci USA. 2008 105:18278-18283; Van Duyne, “Teaching Cre to follow directions.” Proc Natl Acad Sci USA. 2009 Jan. 6; 106(1):4-5; Numrych et al., “A comparison of the effects of single-base and triple-base changes in the integrase arm-type binding sites on the site-specific recombination of bacteriophage λ.” Nucleic Acids Res. 1990; 18:3953-3959; Tirumalai et al., “The recognition of core-type DNA sites by λ integrase.” J Mol Biol. 1998; 279:513-527; Aihara et al., “A conformational switch controls the DNA cleavage activity of λ integrase.” Mol Cell. 2003; 12:187-198; Biswas et al., “A structural basis for allosteric control of DNA recombination by λ integrase.” Nature. 2005; 435:1059-1066; and Warren et al., “Mutations in the amino-terminal domain of λ-integrase have differential effects on integrative and excisive recombination.” Mol Microbiol. 2005; 55:1104-1112; the entire contents of each are incorporated by reference).

### Recombinase Recognition Sequence

[0309] The term “recombinase recognition sequence”, or equivalently as “RRS” or “recombinase target sequence” or “recombinase site,” as used herein, refers to a nucleotide sequence target recognized by a recombinase and which undergoes strand exchange with another DNA molecule having a the RRS that results in excision, integration, inversion, or exchange of DNA fragments between the recombinase recognition sequences. In various embodiments, the multi-strand prime editors may install one or more recombinase sites in a target sequence, or in more than one target sequence. When more than one recombinase site is installed by a multi-strand prime editor, the recombinase sites can be installed at adjacent target sites or non-adjacent target sites (e.g., separate chromosomes). In various embodiments, single installed recombinase sites can be used as “landing sites” for a recombinase-mediated reaction between the genomic recombinase site and a second recombinase site within an exogenously supplied nucleic acid molecule, e.g., a plasmid. This enables the targeted integration of a desired nucleic acid molecule. In other embodiments, where two recombinase sites are inserted in adjacent regions of DNA (e.g., separated by 25-50 bp, 50-100 bp, 100-200 bp, 200-300 bp, 300-400 bp, 400-500 bp, 500-600 bp, 600-700 bp, 700-800 bp, 800-900 bp, 900-1000 bp, 1000-2000 bp, 2000-3000 bp, 3000-4000 bp, 4000-5000 bp, or more), the recombinase sites can be used for recombinase-mediated excision or inversion of the intervening sequence, or for recombinase-mediated cassette exchange with exogenous DNA having the same recombinase sites. When the two or more recombinase sites are installed by multi-flap prime editors on two different chromosomes, translocation of the intervening sequence can occur from a first chromosomal location to the second.

### Recombine or Recombination

[0310] The term “recombine,” or “recombination,” in the context of a nucleic acid modification (e.g., a genomic modification), is used to refer to the process by which two or more nucleic acid molecules, or two or more regions of a single nucleic acid molecule, are modified by the action of a recombinase protein (e.g., an inventive recombinase fusion protein provided herein). Recombination can result in, inter alia, the insertion, inversion, excision, or translocation of nucleic acids, e.g., in or between one or more nucleic acid molecules.

### Reverse Transcriptase

[0311] The term “reverse transcriptase” describes a class of polymerases characterized as RNA-dependent DNA polymerases. All known reverse transcriptases require a primer to synthesize a DNA transcript from an RNA template. Historically, reverse transcriptase has been used primarily to transcribe mRNA into cDNA which can then be cloned into a vector for further manipulation. Avian myoblastosis virus (AMV) reverse transcriptase was the first widely used RNA-dependent DNA polymerase (Verma, Biochim. Biophys. Acta 473:1 (1977)). The enzyme has 5′-3′ RNA-directed DNA polymerase activity, 5′-3′ DNA-directed DNA polymerase activity, and RNase H activity. RNase H is a processive 5′ and 3′ ribonuclease specific for the RNA strand for RNA-DNA hybrids (Perbal, A Practical Guide to Molecular Cloning, New York: Wiley & Sons (1984)). Errors in transcription cannot be corrected by reverse transcriptase because known viral reverse transcriptases lack the 3′-5′ exonuclease activity necessary for proofreading (Saunders and Saunders, Microbial Genetics Applied to Biotechnology, London: Croom Helm (1987)). A detailed study of the activity of AMV reverse transcriptase and its associated RNase H activity has been presented by Berger et al., Biochemistry 22:2365-2372 (1983). Another reverse transcriptase which is used extensively in molecular biology is reverse transcriptase originating from Moloney murine leukemia virus (M-MLV). See, e.g., Gerard, G. R., DNA 5:271-279 (1986) and Kotewicz, M. L., et al., Gene 35:249-258 (1985). M-MLV reverse transcriptase substantially lacking in RNase H activity has also been described. See, e.g., U.S. Pat. No. 5,244,797. The invention contemplates the use of any such reverse transcriptases, or variants or mutants thereof.

[0312] In addition, the invention contemplates the use of reverse transcriptases that are error-prone, i.e., that may be referred to as error-prone reverse transcriptases or reverse transcriptases that do not support high fidelity incorporation of nucleotides during polymerization. During synthesis of the single-strand DNA flap based on the RT template integrated with the guide RNA, the error-prone reverse transcriptase can introduce one or more nucleotides which are mismatched with the RT template sequence, thereby introducing changes to the nucleotide sequence through erroneous polymerization of the single-strand DNA flap. These errors introduced during synthesis of the single strand DNA flap then become integrated into the double strand molecule through hybridization to the corresponding endogenous target strand, removal of the endogenous displaced strand, ligation, and then through one more round of endogenous DNA repair and/or sequencing processes.

### Reverse Transcription

[0313] As used herein, the term “reverse transcription” indicates the capability of an enzyme to synthesize a DNA strand (that is, complementary DNA or cDNA) using RNA as a template. In some embodiments, the reverse transcription can be “error-prone reverse transcription,” which refers to the properties of certain reverse transcriptase enzymes which are error-prone in their DNA polymerization activity.

### PACE

[0314] The term “phage-assisted continuous evolution (PACE),” as used herein, refers to continuous evolution that employs phage as viral vectors. The general concept of PACE technology has been described, for example, in International PCT Application, PCT/US2009/056194, filed September 8, 2009, published as WO 2010/028347 on Mar. 11, 2010; International PCT Application, PCT/US2011/066747, filed Dec. 22, 2011, published as WO 2012/088381 on Jun. 28, 2012; U.S. Application, U.S. Pat. No. 9,023,594, issued May 5, 2015, International PCT Application, PCT/US2015/012022, filed Jan. 20, 2015, published as WO 2015/134121 on Sep. 11, 2015, and International PCT Application, PCT/US2016/027795, filed Apr. 15, 2016, published as WO 2016/168631 on Oct. 20, 2016, the entire contents of each of which are incorporated herein by reference.

### Phage

[0315] The term “phage,” as used herein interchangeably with the term “bacteriophage,” refers to a virus that infects bacterial cells. Typically, phages consist of an outer protein capsid enclosing genetic material.

[0316] The genetic material can be ssRNA, dsRNA, ssDNA, or dsDNA, in either linear or circular form. Phages and phage vectors are well known to those of skill in the art and non-limiting examples of phages that are useful for carrying out the PACE methods provided herein are λ (Lysogen), T2, T4, T7, T12, R17, M13, MS2, G4, P1, P2, P4, Phi X174, N4, Φ6, and Φ29. In certain embodiments, the phage utilized in the present invention is M13. Additional suitable phages and host cells will be apparent to those of skill in the art and the invention is not limited in this aspect. For an exemplary description of additional suitable phages and host cells, see Elizabeth Kutter and Alexander Sulakvelidze: Bacteriophages: Biology and Applications. CRC Press; 1st edition (December 2004), ISBN: 0849313368; Martha R. J. Clokie and Andrew M. Kropinski: Bacteriophages: Methods and Protocols, Volume 1: Isolation, Characterization, and Interactions (Methods in Molecular Biology) Humana Press; 1st edition (December, 2008), ISBN: 1588296822; Martha R. J. Clokie and Andrew M. Kropinski: Bacteriophages: Methods and Protocols, Volume 2: Molecular and Applied Aspects (Methods in Molecular Biology) Humana Press; 1st edition (December 2008), ISBN: 1603275649; all of which are incorporated herein in their entirety by reference for disclosure of suitable phages and host cells as well as methods and protocols for isolation, culture, and manipulation of such phages).

### Protein, Peptide, and Polypeptide

[0317] The terms “protein,” “peptide,” and “polypeptide” are used interchangeably herein, and refer to a polymer of amino acid residues linked together by peptide (amide) bonds. The terms refer to a protein, peptide, or polypeptide of any size, structure, or function. Typically, a protein, peptide, or polypeptide will be at least three amino acids long. A protein, peptide, or polypeptide may refer to an individual protein or a collection of proteins. One or more of the amino acids in a protein, peptide, or polypeptide may be modified, for example, by the addition of a chemical entity such as a carbohydrate group, a hydroxyl group, a phosphate group, a farnesyl group, an isofarnesyl group, a fatty acid group, a linker for conjugation, functionalization, or other modification, etc. A protein, peptide, or polypeptide may also be a single molecule or may be a multi-molecular complex. A protein, peptide, or polypeptide may be just a fragment of a naturally occurring protein or peptide. A protein, peptide, or polypeptide may be naturally occurring, recombinant, or synthetic, or any combination thereof. Any of the proteins provided herein may be produced by any method known in the art. For example, the proteins provided herein may be produced via recombinant protein expression and purification, which is especially suited for fusion proteins comprising a peptide linker. Methods for recombinant protein expression and purification are well known, and include those described by Green and Sambrook, Molecular Cloning: A Laboratory Manual (4th ed., Cold Spring Harbor Laboratory Press, Cold Spring Harbor, N.Y. (2012)), the entire contents of which are incorporated herein by reference.

### Protein Splicing

[0318] The term “protein splicing,” as used herein, refers to a process in which a sequence, an intein (or split inteins, as the case may be), is excised from within an amino acid sequence, and the remaining fragments of the amino acid sequence, the exteins, are ligated via an amide bond to form a continuous amino acid sequence. The term “trans” protein splicing refers to the specific case where the inteins are split inteins and they are located on different proteins.

### Second-Strand Nicking

[0319] The resolution of heteroduplex DNA (i.e., containing one edited and one non-edited strand) formed as a result of prime editing determines long-term editing outcomes. In words, a goal of prime editing is to resolve the heteroduplex DNA (the edited strand paired with the endogenous non-edited strand) formed as an intermediate of PE by permanently integrating the edited strand into the complement, endogenous strand. The approach of “second-strand nicking” can be used herein to help drive the resolution of heteroduplex DNA in favor of permanent integration of the edited strand into the DNA molecule. As used herein, the concept of “second-strand nicking” refers to the introduction of a second nick at a location downstream of the first nick (i.e., the initial nick site that provides the free 3′ end for use in priming of the reverse transcriptase on the extended portion of the guide RNA), preferably on the unedited strand. In certain embodiments, the first nick and the second nick are on opposite strands. In other embodiments, the first nick and the second nick are on opposite strands. In yet another embodiment, the first nick is on the non-target strand (i.e., the strand that forms the single strand portion of the R-loop), and the second nick is on the target strand. In still other embodiments, the first nick is on the edited strand, and the second nick is on the unedited strand. The second nick can be positioned at least 5 nucleotides downstream of the first nick, or at least 6, 7, 8, 9, 10, 11, 12, 13, 14, 15, 16, 17, 18, 19, 20, 21, 22, 23, 24, 25, 26, 27, 28, 29, 30, 40, 50, 60, 70, 80, 90, 100, 110, 120, 130, 140, or 150 or more nucleotides downstream of the first nick. The second nick, in certain embodiments, can be introduced between about 5-150 nucleotides on the unedited strand away from the site of the PEgRNA-induced nick, or between about 5-140, or between about 5-130, or between about 5-120, or between about 5-110, or between about 5-100, or between about 5-90, or between about 5-80, or between about 5-70, or between about 5-60, or between about 5-50, or between about 5-40, or between about 5-30, or between about 5-20, or between about 5-10. In one embodiment, the second nick is introduced between 14-116 nucleotides away from the PEgRNA-induced nick. Without being bound by theory, the second nick induces the cell's endogenous DNA repair and replication processes towards replacement or editing of the unedited strand, thereby permanently installing the edited sequence on both strands and resolving the heteroduplex that is formed as a result of PE. In some embodiments, the edited strand is the non-target strand and the unedited strand is the target strand. In other embodiments, the edited strand is the target strand, and the unedited strand is the non-target strand.

### Sense Strand

[0320] In genetics, a “sense” strand is the segment within double-stranded DNA that runs from 5′ to 3′, and which is complementary to the antisense strand of DNA, or template strand, which runs from 3′ to 5′. In the case of a DNA segment that encodes a protein, the sense strand is the strand of DNA that has the same sequence as the mRNA, which takes the antisense strand as its template during transcription, and eventually undergoes (typically, not always) translation into a protein. The antisense strand is thus responsible for the RNA that is later translated to protein, while the sense strand possesses a nearly identical makeup to that of the mRNA. Note that for each segment of dsDNA, there will possibly be two sets of sense and antisense, depending on which direction one reads (since sense and antisense is relative to perspective). It is ultimately the gene product, or mRNA, that dictates which strand of one segment of dsDNA is referred to as sense or antisense.

[0321] In the context of a PEgRNA, the first step is the synthesis of a single-strand complementary DNA (i.e., the 3′ ssDNA flap, which becomes incorporated) oriented in the 5′ to 3′ direction which is templated off of the PEgRNA extension arm. Whether the 3′ ssDNA flap should be regarded as a sense or antisense strand depends on the direction of transcription since it well accepted that both strands of DNA may serve as a template for transcription (but not at the same time). Thus, in some embodiments, the 3′ ssDNA flap (which overall runs in the 5′ to 3′ direction) will serve as the sense strand because it is the coding strand. In other embodiments, the 3′ ssDNA flap (which overall runs in the 5′ to 3′ direction) will serve as the antisense strand and thus, the template for transcription.

### Sequence Homology

[0322] A “homologous sequence” or a sequence exhibiting “homology” to another sequence means a sequence of a nucleic acid molecule exhibiting at least about 65%, 70%, 75%, 80%, 85%, or 90% sequence identity to another nucleic acid molecule. In other embodiments, a “homologous sequence” of nucleic acids may exhibit 93%, 95% or 98% sequence identity to the reference nucleic acid.

[0323] When a percentage of sequence homology or identity is specified, in the context of two nucleic acid sequences or two polypeptide sequences, the percentage of homology or identity generally refers to the alignment of two or more sequences across a portion of their length when, compared and aligned for maximum correspondence. Unless stated otherwise, sequence homology or identity is assessed over the specified length of the nucleic acid, polypeptide, or portion thereof. In some embodiments, the homology or identity is assessed over a functional portion or specified portion of the length.

[0324] Alignment of sequences for assessment of sequence homology can be conducted by algorithms known in the art, such as the Basic Local Alignment Search Tool (BLAST) algorithm, which is described in Altschul et al, J. Mol. Biol. 215:403-410, 1990. A publicly available internet interface for performing BLAST analyses is accessible through the National Center for Biotechnology Information. Additional known algorithms include those published in: Smith & Waterman, “Comparison of Biosequences”, Adv. Appl. Math. 2:482, 1981; Needleman & Wunsch, “A general method applicable to the search for similarities in the amino acid sequence of two proteins” J. Mol. Biol. 48:443, 1970; Pearson & Lipman “Improved tools for biological sequence comparison”, Proc. Natl. Acad. Sci. USA 85:2444, 1988; or by automated implementation of these or similar algorithms. Global alignment programs may also be used to align similar sequences of roughly equal size. Examples of global alignment programs include NEEDLE (available at www.ebi.ac.uk/Tools/psa/emboss_needle/) which is part of the EMBOSS package (Rice P et al., Trends Genet., 2000; 16: 276-277), and the GGSEARCH program fasta.bioch. Virginia. edu/fasta_www2/fasta_www.cgi?rm=compare&pgm=gnw), which is part of the FASTA package (Pearson W and Lipman D, 1988, Proc. Natl. Acad. Sci. USA, 85: 2444-2448). Both of these programs are based on the Needleman-Wunsch algorithm which is used to find the optimum alignment (including gaps) of two sequences along their entire length. A detailed discussion of sequence analysis can also be found in Unit 19.3 of Ausubel et al (“Current Protocols in Molecular Biology” John Wiley & Sons Inc, 1994-1998, Chapter 15, 1998).

### Spacer Sequence

[0325] As used herein, the term “spacer sequence” in connection with a guide RNA or a PEgRNA refers to the portion of the guide RNA or PEgRNA of about 20 nucleotides which contains a nucleotide sequence that shares the same sequence as the protospacer sequence in the target DNA sequence. The spacer sequence anneals to the complement of the protospacer sequence to form a ssRNA/ssDNA hybrid structure at the target site and a corresponding R loop ssDNA structure of the endogenous DNA strand.

### Subject

[0326] The term “subject,” as used herein, refers to an individual organism, for example, an individual mammal. In some embodiments, the subject is a human In some embodiments, the subject is a non-human mammal In some embodiments, the subject is a non-human primate. In some embodiments, the subject is a rodent. In some embodiments, the subject is a sheep, a goat, a cattle, a cat, or a dog. In some embodiments, the subject is a vertebrate, an amphibian, a reptile, a fish, an insect, a fly, or a nematode. In some embodiments, the subject is a research animal. In some embodiments, the subject is genetically engineered, e.g., a genetically engineered non-human subject. The subject may be of either sex and at any stage of development.

### Split Intein

[0327] Although inteins are most frequently found as a contiguous domain, some exist in a naturally split form. In this case, the two fragments are expressed as separate polypeptides and must associate before splicing takes place, so-called protein trans-splicing.

[0328] An exemplary split intein is the Ssp DnaE intein, which comprises two subunits, namely, DnaE-N and DnaE-C. The two different subunits are encoded by separate genes, namely dnaE-n and dnaE-c, which encode the DnaE-N and DnaE-C subunits, respectively. DnaE is a naturally occurring split intein in Synechocytis sp. PCC6803 and is capable of directing trans-splicing of two separate proteins, each comprising a fusion with either DnaE-N or DnaE-C.

[0329] Additional naturally occurring or engineered split-intein sequences are known in the or can be made from whole-intein sequences described herein or those available in the art. Examples of split-intein sequences can be found in Stevens et al., “A promiscuous split intein with expanded protein engineering applications,” PNAS, 2017, Vol.114: 8538-8543; Iwai et al., “Highly efficient protein trans-splicing by a naturally split DnaE intein from Nostc punctiforme, FEBS Lett, 580: 1853-1858, each of which are incorporated herein by reference. Additional split intein sequences can be found, for example, in WO 2013/045632, WO 2014/055782, WO 2016/069774, and EP2877490, the contents each of which are incorporated herein by reference.

[0330] In addition, protein splicing in trans has been described in vivo and in vitro (Shingledecker, et al., Gene 207:187 (1998), Southworth, et al., EMBO J. 17:918 (1998); Mills, et al., Proc. Natl. Acad. Sci. USA, 95:3543-3548 (1998); Lew, et al., J. Biol. Chem., 273:15887-15890 (1998); Wu, et al., Biochim. Biophys. Acta 35732:1 (1998b), Yamazaki, et al., J. Am. Chem. Soc. 120:5591 (1998), Evans, et al., J. Biol. Chem. 275:9091 (2000); Otomo, et al., Biochemistry 38:16040-16044 (1999); Otomo, et al., J. Biolmol. NMR 14:105-114 (1999); Scott, et al., Proc. Natl. Acad. Sci. USA 96:13638-13643 (1999)) and provides the opportunity to express a protein as to two inactive fragments that subsequently undergo ligation to form a functional product, e.g., as shown in FIGS. 66 and 67 with regard to the formation of a complete PE fusion protein from two separately-expressed halves.

### Target Site

[0331] The term “target site” refers to a sequence within a nucleic acid molecule that is edited by a prime editor (PE) disclosed herein. The target site further refers to the sequence within a nucleic acid molecule to which a complex of the prime editor (PE) and gRNA binds.

tPERT

[0332] See definition for “trans prime editor RNA template (tPERT).”

### Temporal Second-Strand Nicking

[0333] As used herein, the term “temporal second-strand nicking” refers to a variant of second strand nicking whereby the installation of the second nick in the unedited strand occurs only after the desired edit is installed in the edited strand. This avoids concurrent nicks on both strands that could lead to double-stranded DNA breaks. The second-strand nicking guide RNA is designed for temporal control such that the second strand nick is not introduced until after the installation of the desired edit. This is achieved by designing a gRNA with a spacer sequence that matches only the edited strand, but not the original allele. Using this strategy, mismatches between the protospacer and the unedited allele should disfavor nicking by the sgRNA until after the editing event on the PAM strand takes place.

### Trans Prime Editing

[0334] As used herein, the term “trans prime editing” or similarly, “trans dual prime editing,” refers to a modified form of prime editing or dual prime editing that utilizes a split PEgRNA, i.e., wherein the PEgRNA is separated into two separate molecules: an sgRNA and a trans prime editing RNA template (tPERT). The sgRNA serves to target the prime editor (or more generally, to target the napDNAbp component of the prime editor) to the desired genomic target site, while the tPERT is used by the polymerase (e.g., a reverse transcriptase) to write new DNA sequence into the target locus once the tPERT is recruited in trans to the prime editor by the interaction of binding domains located on the prime editor and on the tPERT. In one embodiment, the binding domains can include RNA-protein recruitment moieties, such as a MS2 aptamer located on the tPERT and an MS2cp protein fused to the prime editor. An advantage of trans prime editing is that by separating the DNA synthesis template from the guide RNA, one can potentially use longer length templates.

[0335] An embodiment of trans prime editing is shown in FIGS. 3G and 3H. FIG. 3G shows the composition of the trans prime editor complex on the left (“RP-PE:gRNA complex), which comprises an napDNAbp fused to each of a polymerase (e.g., a reverse transcriptase) and a rPERT recruiting protein (e.g., MS2sc), and which is complexed with a guide RNA. FIG. 3G further shows a separate tPERT molecule, which comprises the extension arm features of a PEgRNA, including the DNA synthesis template and the primer binding sequence. The tPERT molecule also includes an RNA-protein recruitment domain (which, in this case, is a stem loop structure and can be, for example, MS2 aptamer). As depicted in the process described in FIG. 3H, the RP-PE:gRNA complex binds to and nicks the target DNA sequence. Then, the recruiting protein (RP) recruits a tPERT to co-localize to the prime editor complex bound to the DNA target site, thereby allowing the primer binding site to bind to the primer sequence on the nicked strand, and subsequently, allowing the polymerase (e.g., RT) to synthesize a single strand of DNA against the DNA synthesis template up through the 5′ of the tPERT.

[0336] While the tPERT is shown in FIG. 3G and FIG. 3H as comprising the PBS and DNA synthesis template on the 5′ end of the RNA-protein recruitment domain, the tPERT in other configurations may be designed with the PBS and DNA synthesis template located on the 3′ end of the RNA-protein recruitment domain However, the tPERT with the 5′ extension has the advantage that synthesis of the single strand of DNA will naturally terminate at the 5′ end of the tPERT and thus, does not risk using any portion of the RNA-protein recruitment domain as a template during the DNA synthesis stage of prime editing.

Trans Prime Editor RNA Template (tPERT)

[0337] As used herein, a “trans prime editor RNA template (tPERT)” refers to a component used in trans prime editing or trans dual prime editing, a modified version of prime editing which operates by separating the PEgRNA into two distinct molecules: a guide RNA and a tPERT molecule. The tPERT molecule is programmed to co-localize with the prime editor complex at a target DNA site, bringing the primer binding site and the DNA synthesis template to the prime editor in trans. For example, see FIG. 3G for an embodiment of a trans prime editor (tPE) which shows a two-component system comprising (1) an RP-PE:gRNA complex and (2) a tPERT that includes the primer binding site and the DNA synthesis template joined to an RNA-protein recruitment domain, wherein the RP (recruiting protein) component of the RP-PE:gRNA complex recruits the tPERT to a target site to be edited, thereby associating the PBS and DNA synthesis template with the prime editor in trans. Said another way, the tPERT is engineered to contain (all or part of) the extension arm of a PEgRNA, which includes the primer binding site and the DNA synthesis template.

### Transitions

[0338] As used herein, “transitions” refer to the interchange of purine nucleobases (A↔G) or the interchange of pyrimidine nucleobases (C↔T). This class of interchanges involves nucleobases of similar shape. The compositions and methods disclosed herein are capable of inducing one or more transitions in a target DNA molecule. The compositions and methods disclosed herein are also capable of inducing both transitions and transversion in the same target DNA molecule. These changes involve A↔G, G↔A, C↔T, or T↔C. In the context of a double-strand DNA with Watson-Crick paired nucleobases, transversions refer to the following base pair exchanges: A:T↔G:C, G:G↔A:T, C:G↔T:A, or C:G. The compositions and methods disclosed herein are capable of inducing one or more transitions in a target DNA molecule. The compositions and methods disclosed herein are also capable of inducing both transitions and transversion in the same target DNA molecule, as well as other nucleotide changes, including deletions and insertions.

### Transversions

[0339] As used herein, “transversions” refer to the interchange of purine nucleobases for pyrimidine nucleobases, or in the reverse and thus, involve the interchange of nucleobases with dissimilar shape. These changes involve T↔A, T↔G, C↔G, C↔A, A↔T, A↔C, G↔C, and G↔T. In the context of a double-strand DNA with Watson-Crick paired nucleobases, transversions refer to the following base pair exchanges: T:A↔A:T, T:A↔G:C, C:G↔G:C, C:G↔A:T, A:T↔T:A, A:T↔C:G, G:C↔C:G, and G:C↔T:A. The compositions and methods disclosed herein are capable of inducing one or more transversions in a target DNA molecule. The compositions and methods disclosed herein are also capable of inducing both transitions and transversion in the same target DNA molecule, as well as other nucleotide changes, including deletions and insertions.

### Treatment

[0340] The terms “treatment,” “treat,” and “treating,” refer to a clinical intervention aimed to reverse, alleviate, delay the onset of, or inhibit the progress of a disease or disorder, or one or more symptoms thereof, as described herein. As used herein, the terms “treatment,” “treat,” and “treating” refer to a clinical intervention aimed to reverse, alleviate, delay the onset of, or inhibit the progress of a disease or disorder, or one or more symptoms thereof, as described herein. In some embodiments, treatment may be administered after one or more symptoms have developed and/or after a disease has been diagnosed. In other embodiments, treatment may be administered in the absence of symptoms, e.g., to prevent or delay onset of a symptom or inhibit onset or progression of a disease. For example, treatment may be administered to a susceptible individual prior to the onset of symptoms (e.g., in light of a history of symptoms and/or in light of genetic or other susceptibility factors). Treatment may also be continued after symptoms have resolved, for example, to prevent or delay their recurrence.

### Trinucleotide Repeat Disorder

[0341] As used herein, a “trinucleotide repeat disorder” (or alternatively, “expansion repeat disorder” or “repeat expansion disorder”) refers to a set of genetic disorders which are cause by “trinucleotide repeat expansion,” which is a kind of mutation where a certain trinucleotide repeats in certain genes or introns. Trinucleotide repeats were once thought to be commonplace iterations in the genome, but the 1990s clarified these disorders. These apparently ‘benign’ stretches of DNA can sometimes expand and cause disease. Several defining features are shared amongst disorders caused by trinucleotide repeat expansions. First, the mutant repeats show both somatic and germline instability and, more frequently, they expand rather than contract in successive transmissions. Secondly, an earlier age of onset and increasing severity of phenotype in subsequent generations (anticipation) generally are correlated with larger repeat length. Finally, the parental origin of the disease allele can often influence anticipation, with paternal transmissions carrying a greater risk of expansion for many of these disorders.

[0342] Triplet expansion is thought to be caused by slippage during DNA replication. Due to the repetitive nature of the DNA sequence in these regions ‘loop out’ structures may form during DNA replication while maintaining complementary base pairing between the parent strand and daughter strand being synthesized. If the loop out structure is formed from sequence on the daughter strand this will result in an increase in the number of repeats. However, if the loop out structure is formed on the parent strand a decrease in the number of repeats occurs. It appears that expansion of these repeats is more common than reduction. Generally the larger the expansion the more likely they are to cause disease or increase the severity of disease. This property results in the characteristic of anticipation seen in trinucleotide repeat disorders. Anticipation describes the tendency of age of onset to decrease and severity of symptoms to increase through successive generations of an affected family due to the expansion of these repeats.

[0343] Nucleotide repeat disorders may include those in which the triplet repeat occurs in a non-coding region (i.e., a non-coding trinucleotide repeat disorder) or in a coding region

[0344] The prime editor (PE) system described herein may use to treat nucleotide repeat disorders, which may include fragile X syndrome (FRAXA), fragile XE MR (FRAXE), Freidreich ataxia (FRDA), myotonic dystrophy (DM), spinocerebellar ataxia type 8 (SCAB), and spinocerebellar ataxia type 12 (SCA12), among others.

### Upstream

[0345] As used herein, the terms “upstream” and “downstream” are terms of relativity that define the linear position of at least two elements located in a nucleic acid molecule (whether single or double-stranded) that is orientated in a 5′-to-3′ direction. In particular, a first element is upstream of a second element in a nucleic acid molecule where the first element is positioned somewhere that is 5′ to the second element. For example, a SNP is upstream of a Cas9-induced nick site if the SNP is on the 5′ side of the nick site. Conversely, a first element is downstream of a second element in a nucleic acid molecule where the first element is positioned somewhere that is 3′ to the second element. For example, a SNP is downstream of a Cas9-induced nick site if the SNP is on the 3′ side of the nick site. The nucleic acid molecule can be a DNA (double or single stranded). RNA (double or single stranded), or a hybrid of DNA and RNA. The analysis is the same for single strand nucleic acid molecule and a double strand molecule since the terms upstream and downstream are in reference to only a single strand of a nucleic acid molecule, except that one needs to select which strand of the double stranded molecule is being considered. Often, the strand of a double stranded DNA which can be used to determine the positional relativity of at least two elements is the “sense” or “coding” strand. In genetics, a “sense” strand is the segment within double-stranded DNA that runs from 5′ to 3′, and which is complementary to the antisense strand of DNA, or template strand, which runs from 3′ to 5′. Thus, as an example, a SNP nucleobase is “downstream” of a promoter sequence in a genomic DNA (which is double-stranded) if the SNP nucleobase is on the 3′ side of the promoter on the sense or coding strand.

### Variant

[0346] As used herein the term “variant” should be taken to mean the exhibition of qualities that have a pattern that deviates from what occurs in nature, e.g., a variant Cas9 is a Cas9 comprising one or more changes in amino acid residues as compared to a wild type Cas9 amino acid sequence. The term “variant” encompasses homologous proteins having at least 75%, or at least 80%, or at least 85%, or at least 90%, or at least 95%, or at least 99% percent identity with a reference sequence and having the same or substantially the same functional activity or activities as the reference sequence. The term also encompasses mutants, truncations, or domains of a reference sequence, and which display the same or substantially the same functional activity or activities as the reference sequence.

### Vector

[0347] The term “vector,” as used herein, refers to a nucleic acid that can be modified to encode a gene of interest and that is able to enter into a host cell, mutate and replicate within the host cell, and then transfer a replicated form of the vector into another host cell. Exemplary suitable vectors include viral vectors, such as retroviral vectors or bacteriophages and filamentous phage, and conjugative plasmids. Additional suitable vectors will be apparent to those of skill in the art based on the instant disclosure.

### Wild Type

[0348] As used herein the term “wild type” is a term of the art understood by skilled persons and means the typical form of an organism, strain, gene or characteristic as it occurs in nature as distinguished from mutant or variant forms.

### 5′ Endogenous DNA Flap

[0349] As used herein, the term “5′ endogenous DNA flap” refers to the strand of DNA situated immediately downstream of the PE-induced nick site in the target DNA. The nicking of the target DNA strand by PE exposes a 3′ hydroxyl group on the upstream side of the nick site and a 5′ hydroxyl group on the downstream side of the nick site. The endogenous strand ending in the 3′ hydroxyl group is used to prime the DNA polymerase of the prime editor (e.g., wherein the DNA polymerase is a reverse transcriptase). The endogenous strand on the downstream side of the nick site and which begins with the exposed 5′ hydroxyl group is referred to as the “5′ endogenous DNA flap” and is ultimately removed and replaced by the newly synthesized replacement strand (i.e., “3′ replacement DNA flap”) the encoded by the extension of the PEgRNA.

### 5′ Endogenous DNA Flap Removal

[0350] As used herein, the term “5′ endogenous DNA flap removal” or “5′ flap removal” refers to the removal of the 5′ endogenous DNA flap that forms when the RT-synthesized single-strand DNA flap competitively invades and hybridizes to the endogenous DNA, displacing the endogenous strand in the process. Removing this endogenous displaced strand can drive the reaction towards the formation of the desired product comprising the desired nucleotide change. The cell's own DNA repair enzymes may catalyze the removal or excision of the 5′ endogenous flap (e.g., a flap endonuclease, such as EXO1 or FEN1). Also, host cells may be transformed to express one or more enzymes that catalyze the removal of said 5′ endogenous flaps, thereby driving the process toward product formation (e.g., a flap endonuclease). Flap endonucleases are known in the art and can be found described in Patel et al., “Flap endonucleases pass 5′-flaps through a flexible arch using a disorder-thread-order mechanism to confer specificity for free 5′-ends,” Nucleic Acids Research, 2012, 40(10): 4507-4519 and Tsutakawa et al., “Human flap endonuclease structures, DNA double-base flipping, and a unified understanding of the FEN1 superfamily,” Cell, 2011, 145(2): 198-211 (each of which are incorporated herein by reference).

### 3′ Replacement DNA Flap

[0351] As used herein, the term “3′ replacement DNA flap” or simply, “replacement DNA flap,” refers to the strand of DNA that is synthesized by the prime editor and which is encoded by the extension arm of the prime editor PEgRNA. More in particular, the 3′ replacement DNA flap is encoded by the polymerase template of the PEgRNA. The 3′ replacement DNA flap comprises the same sequence as the 5′ endogenous DNA flap except that it also contains the edited sequence (e.g., single nucleotide change). The 3′ replacement DNA flap anneals to the target DNA, displacing or replacing the 5′ endogenous DNA flap (which can be excised, for example, by a 5′ flap endonuclease, such as FEN1 or EXO1) and then is ligated to join the 3′ end of the 3′ replacement DNA flap to the exposed 5′ hydoxyl end of endogenous DNA (exposed after excision of the 5′ endogenous DNA flap, thereby reforming a phosophodiester bond and installing the 3′ replacement DNA flap to form a heteroduplex DNA containing one edited strand and one unedited strand. DNA repair processes resolve the heteroduplex by copying the information in the edited strand to the complementary strand permanently installs the edit in to the DNA. This resolution process can be driven further to completion by nicking the unedited strand, i.e., by way of “second-strand nicking,” as described herein.

### DETAILED DESCRIPTION OF CERTAIN EMBODIMENTS

[0352] Adoption of the clustered regularly interspaced short palindromic repeat (CRISPR) system for genome editing has revolutionized the life sciences¹⁻³. Although gene disruption using CRISPR is now routine, the precise installation of single nucleotide edits remains a major challenge, despite being necessary for studying or correcting a large number of disease-causative mutations. Homology directed repair (HDR) is capable of achieving such edits, but suffers from low efficiency (often <5%), a requirement for donor DNA repair templates, and deleterious effects of double-stranded DNA break (DSB) formation. Recently, Prof. David Liu et al.'s laboratory developed base editing, which achieves efficient single nucleotide editing without DSBs. Base editors (BEs) combine the CRISPR system with base-modifying deaminase enzymes to convert target C•G or A•T base pairs to A•T or G•C, respectively⁴⁻⁶. Although already widely used by researchers worldwide, current BEs enable only four of the twelve possible base pair conversions and are unable to correct small insertions or deletions. Moreover, the targeting scope of base editing is limited by the editing of non-target C or A bases adjacent to the target base (“bystander editing”) and by the requirement that a PAM sequence exist 15±2 bp from the target base. Overcoming these limitations would therefore greatly broaden the basic research and therapeutic applications of genome editing.

[0353] New precision editing approaches (e.g., classical prime editing) have been developed that offer many of the benefits of base editing—namely, avoidance of double strand breaks and donor DNA repair templates—while overcoming its major limitations. The proposed approach described herein achieves the direct installation of edited DNA strands at target genomic sites using target-primed reverse transcription (TPRT). In the design discussed herein, CRISPR guide RNA (gRNA) will be engineered to carry a reverse transcriptase (RT) template sequence encoding a single-stranded DNA comprising a desired nucleotide change. The CRISPR nuclease (Cas9)-nicked target site DNA will serve as the primer for reverse transcription of the template sequence on the modified gRNA, allowing for direct incorporation of any desired nucleotide edit.

[0354] The mechanism of target-primed reverse transcription (TPRT) can be leveraged or adapted for conducting precision CRISPR/Cas-based genome editing with high efficiency and genetic flexibility (e.g., as depicted in various embodiments of FIGS. 1A-1F). Cas protein-reverse transcriptase fusions are used to target a specific DNA sequence with a modified guide RNA (“an extended guide RNA”), generate a single strand nick at the target site, and use the nicked DNA as a primer for reverse transcription of an engineered reverse transcriptase template that is integrated into the extended guide RNA. The newly synthesized strand would be homologous to the genomic target sequence except for the inclusion of a desired nucleotide change (e.g., a single nucleotide change, a deletion, or an insertion, or a combination thereof). The newly synthesize strand of DNA may be referred to as a single strand DNA flap, which would compete for hybridization with the complementary homologous endogenous DNA strand, thereby displacing the corresponding endogenous strand. Resolution of this hybridized intermediate can include removal of the resulting displaced flap of endogenous DNA (e.g., with a 5′ end DNA flap endonuclease, FEN1), ligation of the synthesized single strand DNA flap to the target DNA, and assimilation of the desired nucleotide change as a result of cellular DNA repair and/or replication processes. Because templated DNA synthesis offers single nucleotide precision, the scope of this approach is very broad and could foreseeably be used for myriad applications in basic science and therapeutics.

[0355] The present invention describes a new platform for genome editing called “multi-flap prime editing” (including, for example, “dual-flap prime editing” and “quadruple-flap prime editing”) and represents an innovative advancement of “prime editing” or “classical prime editing,” as described by the present inventors in Anzalone, A. V. et al. Search-and-replace genome editing without double-strand breaks or donor DNA. Nature 576, 149-157 (2019), which is incorporated herein by reference. Whereas classical prime editing in various embodiments polymerizes at a nick site a single 3′ flap which becomes integrated into the target nucleic acid on the same strand, the presently described multi-flap prime editing systems involve distinct constructs, systems, and methodologies that, in various embodiments, generate pairs or multiple pairs of 3′ flaps on different strands, which form duplexes comprising desired edits and which become incorporated into target nucleic acid molecules, e.g., at specific loci or edit sites in a genome. In various aspects, the pairs or multiple pairs of 3′ flaps form duplexes because they comprise reverse complementary sequences which anneal to one another once generated by the prime editors described herein. The duplexes become incorporated into the target site by cell-driven mechanisms that naturally replace the endogenous duplex sequences located between adjacent nick sites. In certain embodiments, the new duplex sequences may be introduced at one or more locations (e.g., at adjacent genomic loci or on two different chromosomal locations), and may comprise one or more sequences of interest, e.g., protein-encoding sequence, peptide-encoding sequence, or RNA-encoding sequence. In one embodiment, the new duplex sequences installed by the multi-flap prime editing systems may comprise a recombinase site, e.g., a Bxb1 recombinase attB (38 bp) and/or attP (50 bp) site, or a recombinase site recognized by Hin recombinase, Gin recombinase, Tn3 recombinase, β-six recombinase, CinH recombinase, ParA recombinase, γδ recombinase, ϕC31 recombinase, TP901 recombinase, TG1 recombinase, φBT1 recombinase, R4 recombinase, φRV1 recombinase, φFC1 recombinase, MR11 recombinase, A118 recombinase, U153 recombinase, and gp29 recombinase, Cre recombinase, FLP recombinase, R recombinase, Lambda recombinase, HK101 recombinase, HK022 recombinase, and pSAM2 recombinase.

[0356] In various aspects, this Specification describes a multi-flap prime editing system (including, for example, dual prime editing systems and quadruple prime editing systems) that addresses the challenges associated with flap equilibration and subsequent incorporation of the edit into the non-edited complementary genomic DNA strand by simultaneously editing both DNA strands. In the dual-flap prime editing system, for example, two PEgRNAs are used to target opposite strands of a genomic site and direct the synthesis of two complementary 3′ flaps containing edited DNA sequence (FIG. 90). Unlike classical prime editing, there is no requirement for the pair of edited DNA strands (3′ flaps) to directly compete with 5′ flaps in endogenous genomic DNA, as the complementary edited strand is available for hybridization instead. Since both strands of the duplex are synthesized as edited DNA, the dual-flap prime editing system obviates the need for the replacement of the non-edited complementary DNA strand required by classical prime editing. Instead, cellular DNA repair machinery need only excise the paired 5′ flaps (original genomic DNA) and ligate the paired 3′ flaps (edited DNA) into the locus. Therefore, there is also no need to include sequences homologous to genomic DNA in the newly synthesized DNA strands, allowing selective hybridization of the new strands and facilitating edits that contain minimal genomic homology. Nuclease-active versions of prime editors that cut both strands of DNA could also be used to accelerate the removal of the original DNA sequence. The quadruple-flap prime editing system, using four PEgRNAs, provides similar advantages.

[1] napDNAbp

[0357] The multi-flap prime editors described herein may comprise a nucleic acid programmable DNA binding protein (napDNAbp).

[0358] In one aspect, a napDNAbp can be associated with or complexed with at least one guide nucleic acid (e.g., guide RNA or a PEgRNA), which localizes the napDNAbp to a DNA sequence that comprises a DNA strand (i.e., a target strand) that is complementary to the guide nucleic acid, or a portion thereof (e.g., the spacer of a guide RNA which anneals to the protospacer of the DNA target). In other words, the guide nucleic-acid “programs” the napDNAbp (e.g., Cas9 or equivalent) to localize and bind to complementary sequence of the protospacer in the DNA.

[0359] Any suitable napDNAbp may be used in the multi-flap prime editors described herein. In various embodiments, the napDNAbp may be any Class 2 CRISPR-Cas system, including any type II, type V, or type VI CRISPR-Cas enzyme. Given the rapid development of CRISPR-Cas as a tool for genome editing, there have been constant developments in the nomenclature used to describe and/or identify CRISPR-Cas enzymes, such as Cas9 and Cas9 orthologs. This application references CRISPR-Cas enzymes with nomenclature that may be old and/or new. The skilled person will be able to identify the specific CRISPR-Cas enzyme being referenced in this Application based on the nomenclature that is used, whether it is old (i.e., “legacy”) or new nomenclature. CRISPR-Cas nomenclature is extensively discussed in Makarova et al., “Classification and Nomenclature of CRISPR-Cas Systems: Where from Here?,” The CRISPR Journal, Vol. 1. No. 5, 2018, the entire contents of which are incorporated herein by reference. The particular CRISPR-Cas nomenclature used in any given instance in this Application is not limiting in any way and the skilled person will be able to identify which CRISPR-Cas enzyme is being referenced.

[0360] For example, the following type II, type V, and type VI Class 2 CRISPR-Cas enzymes have the following art-recognized old (i.e., legacy) and new names. Each of these enzymes, and/or variants thereof, may be used with the multi-flap prime editors described herein:

| | |
|---|---|
| Legacy nomenclature | Current nomenclature* |

type II CRISPR-Cas enzymes

| | |
|---|---|
| Cas9 | same |

type V CRISPR-Cas enzymes

| | |
|---|---|
| Cpf1 | Cas12a |
| CasX | Cas12e |
| C2c1 | Cas12b1 |
| Cas12b2 | same |
| C2c3 | Cas12c |
| CasY | Cas12d |
| C2c4 | same |
| C2c8 | same |
| C2c5 | same |
| C2c10 | same |
| C2c9 | same |

type VI CRISPR-Cas enzymes

| | |
|---|---|
| C2c2 | Cas13a |
| Cas13d | same |
| C2c7 | Cas13c |
| C2c6 | Cas13b |

*See Makarova et al., The CRISPR Journal, Vol. 1, No. 5, 2018

[0361] Without being bound by theory, the mechanism of action of certain napDNAbp contemplated herein includes the step of forming an R-loop whereby the napDNAbp induces the unwinding of a double-strand DNA target, thereby separating the strands in the region bound by the napDNAbp. The guide RNA spacer then hybridizes to the “target strand” at the protospacer sequence. This displaces a “non-target strand” that is complementary to the target strand, which forms the single strand region of the R-loop. In some embodiments, the napDNAbp includes one or more nuclease activities, which then cut the DNA leaving various types of lesions. For example, the napDNAbp may comprises a nuclease activity that cuts the non-target strand at a first location, and/or cuts the target strand at a second location. Depending on the nuclease activity, the target DNA can be cut to form a “double-stranded break” whereby both strands are cut. In other embodiments, the target DNA can be cut at only a single site, i.e., the DNA is “nicked” on one strand. Exemplary napDNAbp with different nuclease activities include “Cas9 nickase” (“nCas9”) and a deactivated Cas9 having no nuclease activities (“dead Cas9” or “dCas9”).

[0362] The below description of various napDNAbps which can be used in connection with the presently disclosed multi-flap prime editors is not meant to be limiting in any way. The multi-flap prime editors may comprise the canonical SpCas9, or any ortholog Cas9 protein, or any variant Cas9 protein—including any naturally occurring variant, mutant, or otherwise engineered version of Cas9—that is known or that can be made or evolved through a directed evolutionary or otherwise mutagenic process. In various embodiments, the Cas9 or Cas9 variants have a nickase activity, i.e., only cleave one strand of the target DNA sequence. In other embodiments, the Cas9 or Cas9 variants have inactive nucleases, i.e., are “dead” Cas9 proteins. Other variant Cas9 proteins that may be used are those having a smaller molecular weight than the canonical SpCas9 (e.g., for easier delivery) or having modified or rearranged primary amino acid structure (e.g., the circular permutant formats).

[0363] The multi-flap prime editors described herein may also comprise Cas9 equivalents, including Cas12a (Cpf1) and Cas12b1 proteins which are the result of convergent evolution. The napDNAbps used herein (e.g., SpCas9, Cas9 variant, or Cas9 equivalents) may also contain various modifications that alter/enhance their PAM specifities. Lastly, the application contemplates any Cas9, Cas9 variant, or Cas9 equivalent which has at least 70%, at least 75%, at least 80%, at least 85%, at least 90%, at least 91%, at least 92%, at least 93%, at least 94%, at least 95%, at least 96%, at least 97%, at least 98%, at least 99%, or at least 99.9% sequence identity to a reference Cas9 sequence, such as a reference SpCas9 canonical sequence or a reference Cas9 equivalent (e.g., Cas12a (Cpf1)).

[0364] The napDNAbp can be a CRISPR (clustered regularly interspaced short palindromic repeat)-associated nuclease. As outlined above, CRISPR is an adaptive immune system that provides protection against mobile genetic elements (viruses, transposable elements and conjugative plasmids). CRISPR clusters contain spacers, sequences complementary to antecedent mobile elements, and target invading nucleic acids. CRISPR clusters are transcribed and processed into CRISPR RNA (crRNA). In type II CRISPR systems, correct processing of pre-crRNA requires a trans-encoded small RNA (tracrRNA), endogenous ribonuclease 3 (mc), and a Cas9 protein. The tracrRNA serves as a guide for ribonuclease 3-aided processing of pre-crRNA. Subsequently, Cas9/crRNA/tracrRNA endonucleolytically cleaves a linear or circular dsDNA target complementary to the spacer. The target strand not complementary to crRNA is first cut endonucleolytically, then trimmed 3′-5′ exonucleolytically. In nature, DNA-binding and cleavage typically requires protein and both RNAs. However, single guide RNAs (“sgRNA”, or simply “gRNA”) can be engineered so as to incorporate aspects of both the crRNA and tracrRNA into a single RNA species. See, e.g., Jinek M. et al., Science 337:816-821(2012), the entire contents of which is hereby incorporated by reference.

[0365] In some embodiments, the napDNAbp directs cleavage of one or both strands at the location of a target sequence, such as within the target sequence and/or within the complement of the target sequence. In some embodiments, the napDNAbp directs cleavage of one or both strands within about 1, 2, 3, 4, 5, 6, 7, 8, 9, 10, 15, 20, 25, 50, 100, 200, 500, or more base pairs from the first or last nucleotide of a target sequence. In some embodiments, a vector encodes a napDNAbp that is mutated to with respect to a corresponding wild-type enzyme such that the mutated napDNAbp lacks the ability to cleave one or both strands of a target polynucleotide containing a target sequence. For example, an aspartate-to-alanine substitution (D10A) in the RuvC I catalytic domain of Cas9 from S. pyogenes converts Cas9 from a nuclease that cleaves both strands to a nickase (cleaves a single strand). Other examples of mutations that render Cas9 a nickase include, without limitation, H840A, N854A, and N863A in reference to the canonical SpCas9 sequence, or to equivalent amino acid positions in other Cas9 variants or Cas9 equivalents.

[0366] As used herein, the term “Cas protein” refers to a full-length Cas protein obtained from nature, a recombinant Cas protein having a sequences that differs from a naturally occurring Cas protein, or any fragment of a Cas protein that nevertheless retains all or a significant amount of the requisite basic functions needed for the disclosed methods, i.e., (i) possession of nucleic-acid programmable binding of the Cas protein to a target DNA, and (ii) ability to nick the target DNA sequence on one strand. The Cas proteins contemplated herein embrace CRISPR Cas 9 proteins, as well as Cas9 equivalents, variants (e.g., Cas9 nickase (nCas9) or nuclease inactive Cas9 (dCas9)) homologs, orthologs, or paralogs, whether naturally occurring or non-naturally occurring (e.g., engineered or recombinant), and may include a Cas9 equivalent from any Class 2 CRISPR system (e.g., type II, V, VI), including Cas12a (Cpf1), Cas12e (CasX), Cas12b1 (C2c1), Cas12b2, Cas12c (C2c3), C2c4, C2c8, C2c5, C2c10, C2c9 Cas13a (C2c2), Cas13d, Cas13c (C2c7), Cas13b (C2c6), and Cas13b. Further Cas-equivalents are described in Makarova et al., “C2c2 is a single-component programmable RNA-guided RNA-targeting CRISPR effector,” Science 2016; 353(6299) and Makarova et al., “Classification and Nomenclature of CRISPR-Cas Systems: Where from Here?,” The CRISPR Journal, Vol. 1. No. 5, 2018, the contents of which are incorporated herein by reference.

[0367] The terms “Cas9” or “Cas9 nuclease” or “Cas9 moiety” or “Cas9 domain” embrace any naturally occurring Cas9 from any organism, any naturally-occurring Cas9 equivalent or functional fragment thereof, any Cas9 homolog, ortholog, or paralog from any organism, and any mutant or variant of a Cas9, naturally-occurring or engineered. The term Cas9 is not meant to be particularly limiting and may be referred to as a “Cas9 or equivalent.” Exemplary Cas9 proteins are further described herein and/or are described in the art and are incorporated herein by reference. The present disclosure is unlimited with regard to the particular Cas9 that is employed in the multi-flap prime editors described herein.

[0368] As noted herein, Cas9 nuclease sequences and structures are well known to those of skill in the art (see, e.g., “Complete genome sequence of an M1 strain of Streptococcus pyogenes.” Ferretti et al., J. J., McShan W. M., Ajdic D. J., Savic D. J., Savic G., Lyon K., Primeaux C., Sezate S., Suvorov A. N., Kenton S., Lai H. S., Lin S. P., Qian Y., Jia H. G., Najar F. Z., Ren Q., Zhu H., Song L., White J., Yuan X., Clifton S. W., Roe B. A., McLaughlin R. E., Proc. Natl. Acad. Sci. U.S.A. 98:4658-4663(2001); “CRISPR RNA maturation by trans-encoded small RNA and host factor RNase III.” Deltcheva E., Chylinski K., Sharma C. M., Gonzales K., Chao Y., Pirzada Z. A., Eckert M. R., Vogel J., Charpentier E., Nature 471:602-607(2011); and “A programmable dual-RNA-guided DNA endonuclease in adaptive bacterial immunity.” Jinek M., Chylinski K., Fonfara I., Hauer M., Doudna J. A., Charpentier E. Science 337:816-821(2012), the entire contents of each of which are incorporated herein by reference).

[0369] Examples of Cas9 and Cas9 equivalents are provided as follows; however, these specific examples are not meant to be limiting. The multi-flap prime editors of the present disclosure may use any suitable napDNAbp, including any suitable Cas9 or Cas9 equivalent.

[0370] A. Wild Type Canonical SpCas9

[0371] In one embodiment, the multi-flap prime editor constructs described herein may comprise the “canonical SpCas9” nuclease from S. pyogenes, which has been widely used as a tool for genome engineering and is categorized as the type II subgroup of enzymes of the Class 2 CRISPR-Cas systems. This Cas9 protein is a large, multi-domain protein containing two distinct nuclease domains. Point mutations can be introduced into Cas9 to abolish one or both nuclease activities, resulting in a nickase Cas9 (nCas9) or dead Cas9 (dCas9), respectively, that still retains its ability to bind DNA in a sgRNA-programmed manner In principle, when fused to another protein or domain, Cas9, or a variant thereof (e.g., nCas9) can target that protein to virtually any DNA sequence simply by co-expression with an appropriate sgRNA. As used herein, the canonical SpCas9 protein refers to the wild type protein from Streptococcus pyogenes having the following amino acid sequence:

| Description | Sequence | SEQ ID NO: |
|---|---|---|
| SpCas9 | MDKKYSIGLDIGTNSVGWAVITDEYKVPSKKFKVLGNTDR | SEQ ID NO: 18 |
| Streptococcus | HSIKKNLIGALLFDSGETAEATRLKRTARRRYTRRKNRICYL | |
| pyogenes | QEIFSNEMAKVDDSFFHRLEESFLVEEDKKHERHPIFGNIVD | |
| M1 | EVAYHEKYPTIYHLRKKLVDSTDKADLRLIYLALAHMIKFR | |
| SwissProt | GHFLIEGDLNPDNSDVDKLFIQLVQTYNQLFEENPINASGVD | |
| Accession | AKAILSARLSKSRRLENLIAQLPGEKKNGLFGNLIALSLGLTP | |
| No. Q99ZW2 | NFKSNFDLAEDAKLQLSKDTYDDDLDNLLAQIGDQYADLF | |
| Wild type | LAAKNLSDAILLSDILRVNTEITKAPLSASMIKRYDEHHQDL | |
| | TLLKALVRQQLPEKYKEIFFDQSKNGYAGYIDGGASQEEFY | |
| | KFIKPILEKMDGTEELLVKLNREDLLRKQRTFDNGSIPHQIHL | |
| | GELHAILRRQEDFYPFLKDNREKIEKILTFRIPYYVGPLARGN | |
| | SRFAWMTRKSEETITPWNFEEVVDKGASAQSFIERMTNFDK | |
| | NLPNEKVLPKHSLLYEYFTVYNELTKVKYVTEGMRKPAFLS | |
| | GEQKKAIVDLLFKTNRKVTVKQLKEDYFKKIECFDSVEISGV | |
| | EDRFNASLGTYHDLLKIIKDKDFLDNEENEDILEDIVLTLTLF | |
| | EDREMIEERLKTYAHLFDDKVMKQLKRRRYTGWGRLSRKL | |
| | INGIRDKQSGKTILDFLKSDGFANRNFMQLIHDDSLTFKEDIQ | |
| | KAQVSGQGDSLHEHIANLAGSPAIKKGILQTVKVVDELVKV | |
| | MGRHKPENIVIEMARENQTTQKGQKNSRERMKRIEEGIKEL | |
| | GSQILKEHPVENTQLQNEKLYLYYLQNGRDMYVDQELDIN | |
| | RLSDYDVDHIVPQSFLKDDSIDNKVLTRSDKNRGKSDNVPS | |
| | EEVVKKMKNYWRQLLNAKLITQRKFDNLTKAERGGLSELD | |
| | KAGFIKRQLVETRQITKHVAQILDSRMNTKYDENDKLIREV | |
| | KVITLKSKLVSDFRKDFQFYKVREINNYHHAHDAYLNAVV | |
| | GTALIKKYPKLESEFVYGDYKVYDVRKMIAKSEQEIGKATA | |
| | KYFFYSNIMNFFKTEITLANGEIRKRPLIETNGETGEIVWDKG | |
| | RDFATVRKVLSMPQVNIVKKTEVQTGGFSKESILPKRNSDK | |
| | LIARKKDWDPKKYGGFDSPTVAYSVLVVAKVEKGKSKKLK | |
| | SVKELLGITIMERSSFEKNPIDFLEAKGYKEVKKDLIIKLPKY | |
| | SLFELENGRKRMLASAGELQKGNELALPSKYVNFLYLASHY | |
| | EKLKGSPEDNEQKQLFVEQHKHYLDEIIEQISEFSKRVILADA | |
| | NLDKVLSAYNKHRDKPIREQAENIIHLFTLTNLGAPAAFKYF | |
| | DTTIDRKRYTSTKEVLDATLIHQSITGLYETRIDLSQLGGD | |
| SpCas9 | ATGGATAAAAAATATAGCATTGGCCTGGATATTGGCACC | SEQ ID NO: 19 |
| Reverse | AACAGCGTGGGCTGGGCGGTGATTACCGATGAATATAAA | |
| translation of | GTGCCGAGCAAAAAATTTAAAGTGCTGGGCAACACCGAT | |
| SwissProt | CGCCATAGCATTAAAAAAAACCTGATTGGCGCGCTGCTG | |
| Accession | TTTGATAGCGGCGAAACCGCGGAAGCGACCCGCCTGAAA | |
| No. Q99ZW2 | CGCACCGCGCGCCGCCGCTATACCCGCCGCAAAAACCGC | |
| Streptococcus | ATTTGCTATCTGCAGGAAATTTTTAGCAACGAAATGGCGA | |
| pyogenes | AAGTGGATGATAGCTTTTTTCATCGCCTGGAAGAAAGCTT | |
| | TCTGGTGGAAGAAGATAAAAAACATGAACGCCATCCGAT | |
| | TTTTGGCAACATTGTGGATGAAGTGGCGTATCATGAAAA | |
| | ATATCCGACCATTTATCATCTGCGCAAAAAACTGGTGGAT | |
| | AGCACCGATAAAGCGGATCTGCGCCTGATTTATCTGGCG | |
| | CTGGCGCATATGATTAAATTTCGCGGCCATTTTCTGATTG | |
| | AAGGCGATCTGAACCCGGATAACAGCGATGTGGATAAAC | |
| | TGTTTATTCAGCTGGTGCAGACCTATAACCAGCTGTTTGA | |
| | AGAAAACCCGATTAACGCGAGCGGCGTGGATGCGAAAGC | |
| | GATTCTGAGCGCGCGCCTGAGCAAAAGCCGCCGCCTGGA | |
| | AAACCTGATTGCGCAGCTGCCGGGCGAAAAAAAAAACGG | |
| | CCTGTTTGGCAACCTGATTGCGCTGAGCCTGGGCCTGACC | |
| | CCGAACTTTAAAAGCAACTTTGATCTGGCGGAAGATGCG | |
| | AAACTGCAGCTGAGCAAAGATACCTATGATGATGATCTG | |
| | GATAACCTGCTGGCGCAGATTGGCGATCAGTATGCGGAT | |
| | CTGTTTCTGGCGGCGAAAAACCTGAGCGATGCGATTCTGC | |
| | TGAGCGATATTCTGCGCGTGAACACCGAAATTACCAAAG | |
| | CGCCGCTGAGCGCGAGCATGATTAAACGCTATGATGAAC | |
| | ATCATCAGGATCTGACCCTGCTGAAAGCGCTGGTGCGCC | |
| | AGCAGCTGCCGGAAAAATATAAAGAAATTTTTTTTGATC | |
| | AGAGCAAAAACGGCTATGCGGGCTATATTGATGGCGGCG | |
| | CGAGCCAGGAAGAATTTTATAAATTTATTAAACCGATTCT | |
| | GGAAAAAATGGATGGCACCGAAGAACTGCTGGTGAAACT | |
| | GAACCGCGAAGATCTGCTGCGCAAACAGCGCACCTTTGA | |
| | TAACGGCAGCATTCCGCATCAGATTCATCTGGGCGAACT | |
| | GCATGCGATTCTGCGCCGCCAGGAAGATTTTTATCCGTTT | |
| | CTGAAAGATAACCGCGAAAAAATTGAAAAAATTCTGACC | |
| | TTTCGCATTCCGTATTATGTGGGCCCGCTGGCGCGCGGCA | |
| | ACAGCCGCTTTGCGTGGATGACCCGCAAAAGCGAAGAAA | |
| | CCATTACCCCGTGGAACTTTGAAGAAGTGGTGGATAAAG | |
| | GCGCGAGCGCGCAGAGCTTTATTGAACGCATGACCAACT | |
| | TTGATAAAAACCTGCCGAACGAAAAAGTGCTGCCGAAAC | |
| | ATAGCCTGCTGTATGAATATTTTACCGTGTATAACGAACT | |
| | GACCAAAGTGAAATATGTGACCGAAGGCATGCGCAAACC | |
| | GGCGTTTCTGAGCGGCGAACAGAAAAAAGCGATTGTGGA | |
| | TCTGCTGTTTAAAACCAACCGCAAAGTGACCGTGAAACA | |
| | GCTGAAAGAAGATTATTTTAAAAAAATTGAATGCTTTGAT | |
| | AGCGTGGAAATTAGCGGCGTGGAAGATCGCTTTAACGCG | |
| | AGCCTGGGCACCTATCATGATCTGCTGAAAATTATTAAAG | |
| | ATAAAGATTTTCTGGATAACGAAGAAAACGAAGATATTC | |
| | TGGAAGATATTGTGCTGACCCTGACCCTGTTTGAAGATCG | |
| | CGAAATGATTGAAGAACGCCTGAAAACCTATGCGCATCT | |
| | GTTTGATGATAAAGTGATGAAACAGCTGAAACGCCGCCG | |
| | CTATACCGGCTGGGGCCGCCTGAGCCGCAAACTGATTAA | |
| | CGGCATTCGCGATAAACAGAGCGGCAAAACCATTCTGGA | |
| | TTTTCTGAAAAGCGATGGCTTTGCGAACCGCAACTTTATG | |
| | CAGCTGATTCATGATGATAGCCTGACCTTTAAAGAAGAT | |
| | ATTCAGAAAGCGCAGGTGAGCGGCCAGGGCGATAGCCTG | |
| | CATGAACATATTGCGAACCTGGCGGGCAGCCCGGCGATT | |
| | AAAAAAGGCATTCTGCAGACCGTGAAAGTGGTGGATGAA | |
| | CTGGTGAAAGTGATGGGCCGCCATAAACCGGAAAACATT | |
| | GTGATTGAAATGGCGCGCGAAAACCAGACCACCCAGAAA | |
| | GGCCAGAAAAACAGCCGCGAACGCATGAAACGCATTGA | |
| | AGAAGGCATTAAAGAACTGGGCAGCCAGATTCTGAAAGA | |
| | ACATCCGGTGGAAAACACCCAGCTGCAGAACGAAAAACT | |
| | GTATCTGTATTATCTGCAGAACGGCCGCGATATGTATGTG | |
| | GATCAGGAACTGGATATTAACCGCCTGAGCGATTATGAT | |
| | GTGGATCATATTGTGCCGCAGAGCTTTCTGAAAGATGATA | |
| | GCATTGATAACAAAGTGCTGACCCGCAGCGATAAAAACC | |
| | GCGGCAAAAGCGATAACGTGCCGAGCGAAGAAGTGGTG | |
| | AAAAAAATGAAAAACTATTGGCGCCAGCTGCTGAACGCG | |
| | AAACTGATTACCCAGCGCAAATTTGATAACCTGACCAAA | |
| | GCGGAACGCGGCGGCCTGAGCGAACTGGATAAAGCGGG | |
| | CTTTATTAAACGCCAGCTGGTGGAAACCCGCCAGATTACC | |
| | AAACATGTGGCGCAGATTCTGGATAGCCGCATGAACACC | |
| | AAATATGATGAAAACGATAAACTGATTCGCGAAGTGAAA | |
| | GTGATTACCCTGAAAAGCAAACTGGTGAGCGATTTTCGC | |
| | AAAGATTTTCAGTTTTATAAAGTGCGCGAAATTAACAACT | |
| | ATCATCATGCGCATGATGCGTATCTGAACGCGGTGGTGG | |
| | GCACCGCGCTGATTAAAAAATATCCGAAACTGGAAAGCG | |
| | AATTTGTGTATGGCGATTATAAAGTGTATGATGTGCGCAA | |
| | AATGATTGCGAAAAGCGAACAGGAAATTGGCAAAGCGA | |
| | CCGCGAAATATTTTTTTTATAGCAACATTATGAACTTTTTT | |
| | AAAACCGAAATTACCCTGGCGAACGGCGAAATTCGCAAA | |
| | CGCCCGCTGATTGAAACCAACGGCGAAACCGGCGAAATT | |
| | GTGTGGGATAAAGGCCGCGATTTTGCGACCGTGCGCAAA | |
| | GTGCTGAGCATGCCGCAGGTGAACATTGTGAAAAAAACC | |
| | GAAGTGCAGACCGGCGGCTTTAGCAAAGAAAGCATTCTG | |
| | CCGAAACGCAACAGCGATAAACTGATTGCGCGCAAAAAA | |
| | GATTGGGATCCGAAAAAATATGGCGGCTTTGATAGCCCG | |
| | ACCGTGGCGTATAGCGTGCTGGTGGTGGCGAAAGTGGAA | |
| | AAAGGCAAAAGCAAAAAACTGAAAAGCGTGAAAGAACT | |
| | GCTGGGCATTACCATTATGGAACGCAGCAGCTTTGAAAA | |
| | AAACCCGATTGATTTTCTGGAAGCGAAAGGCTATAAAGA | |
| | AGTGAAAAAAGATCTGATTATTAAACTGCCGAAATATAG | |
| | CCTGTTTGAACTGGAAAACGGCCGCAAACGCATGCTGGC | |
| | GAGCGCGGGCGAACTGCAGAAAGGCAACGAACTGGCGC | |
| | TGCCGAGCAAATATGTGAACTTTCTGTATCTGGCGAGCCA | |
| | TTATGAAAAACTGAAAGGCAGCCCGGAAGATAACGAACA | |
| | GAAACAGCTGTTTGTGGAACAGCATAAACATTATCTGGA | |
| | TGAAATTATTGAACAGATTAGCGAATTTAGCAAACGCGT | |
| | GATTCTGGCGGATGCGAACCTGGATAAAGTGCTGAGCGC | |
| | GTATAACAAACATCGCGATAAACCGATTCGCGAACAGGC | |
| | GGAAAACATTATTCATCTGTTTACCCTGACCAACCTGGGC | |
| | GCGCCGGCGGCGTTTAAATATTTTGATACCACCATTGATC | |
| | GCAAACGCTATACCAGCACCAAAGAAGTGCTGGATGCGA | |
| | CCCTGATTCATCAGAGCATTACCGGCCTGTATGAAACCCG | |
| | CATTGATCTGAGCCAGCTGGGCGGCGAT | |

[0372] The multi-flap prime editors described herein may include canonical SpCas9, or any variant thereof having at least 80%, at least 85%, at least 90%, at least 95%, or at least 99% sequence identity with a wild type Cas9 sequence provided above. These variants may include SpCas9 variants containing one or more mutations, including any known mutation reported with the SwissProt Accession No. Q99ZW2 (SEQ ID NO: 18) entry, which include:

| SpCas9 mutation (relative to | |
|---|---|
| the amino acid sequence of the | Function/Characteristic (as reported) (see |
| canonical SpCas9 sequence, | UniProtKB-Q99ZW2 (CAS9_STRPT1) |
| SEQ ID NO: 18) | entry-incorporated herein by reference) |
| D10A | Nickase mutant which cleaves the |
| | protospacer strand (but no cleavage of |
| | non-protospacer strand) |
| S15A | Decreased DNA cleavage activity |
| R66A | Decreased DNA cleavage activity |
| R70A | No DNA cleavage |
| R74A | Decreased DNA cleavage |
| R78A | Decreased DNA cleavage |
| 97-150 deletion | No nuclease activity |
| R165A | Decreased DNA cleavage |
| 175-307 deletion | About 50% decreased DNA cleavage |
| 312-409 deletion | No nuclease activity |
| E762A | Nickase |
| H840A | Nickase mutant which cleaves the |
| | non-protospacer strand but does not |
| | cleave the protospacer strand |
| N854A | Nickase |
| N863A | Nickase |
| H982A | Decreased DNA cleavage |
| D986A | Nickase |
| 1099-1368 deletion | No nuclease activity |
| R1333A | Reduced DNA binding |

[0373] Other wild type SpCas9 sequences that may be used in the present disclosure, include:

| Description | Sequence | SEQ ID NO: |
|---|---|---|
| SpCas9 | ATGGATAAGAAATACTCAATAGGCTTAGATATCGGCACAAAT | SEQ ID NO: 20 |
| Streptococcus | AGCGTCGGATGGGCGGTGATCACTGATGATTATAAGGTTCCG | |
| pyogenes | TCTAAAAAGTTCAAGGTTCTGGGAAATACAGACCGCCACAGT | |
| MGAS1882 | ATCAAAAAAAATCTTATAGGGGCTCTTTTATTTGGCAGTGGAG | |
| wild type | AGACAGCGGAAGCGACTCGTCTCAAACGGACAGCTCGTAGAA | |
| NC_017053.1 | GGTATACACGTCGGAAGAATCGTATTTGTTATCTACAGGAGAT | |
| | TTTTTCAAATGAGATGGCGAAAGTAGATGATAGTTTCTTTCAT | |
| | CGACTTGAAGAGTCTTTTTTGGTGGAAGAAGACAAGAAGCAT | |
| | GAACGTCATCCTATTTTTGGAAATATAGTAGATGAAGTTGCTT | |
| | ATCATGAGAAATATCCAACTATCTATCATCTGCGAAAAAAATT | |
| | GGCAGATTCTACTGATAAAGCGGATTTGCGCTTAATCTATTTG | |
| | GCCTTAGCGCATATGATTAAGTTTCGTGGTCATTTTTTGATTG | |
| | AGGGAGATTTAAATCCTGATAATAGTGATGTGGACAAACTAT | |
| | TTATCCAGTTGGTACAAATCTACAATCAATTATTTGAAGAAAA | |
| | CCCTATTAACGCAAGTAGAGTAGATGCTAAAGCGATTCTTTCT | |
| | GCACGATTGAGTAAATCAAGACGATTAGAAAATCTCATTGCT | |
| | CAGCTCCCCGGTGAGAAGAGAAATGGCTTGTTTGGGAATCTC | |
| | ATTGCTTTGTCATTGGGATTGACCCCTAATTTTAAATCAAATTT | |
| | TGATTTGGCAGAAGATGCTAAATTACAGCTTTCAAAAGATACT | |
| | TACGATGATGATTTAGATAATTTATTGGCGCAAATTGGAGATC | |
| | AATATGCTGATTTGTTTTTGGCAGCTAAGAATTTATCAGATGC | |
| | TATTTTACTTTCAGATATCCTAAGAGTAAATAGTGAAATAACT | |
| | AAGGCTCCCCTATCAGCTTCAATGATTAAGCGCTACGATGAAC | |
| | ATCATCAAGACTTGACTCTTTTAAAAGCTTTAGTTCGACAACA | |
| | ACTTCCAGAAAAGTATAAAGAAATCTTTTTTGATCAATCAAAA | |
| | AACGGATATGCAGGTTATATTGATGGGGGAGCTAGCCAAGAA | |
| | GAATTTTATAAATTTATCAAACCAATTTTAGAAAAAATGGATG | |
| | GTACTGAGGAATTATTGGTGAAACTAAATCGTGAAGATTTGCT | |
| | GCGCAAGCAACGGACCTTTGACAACGGCTCTATTCCCCATCA | |
| | AATTCACTTGGGTGAGCTGCATGCTATTTTGAGAAGACAAGA | |
| | AGACTTTTATCCATTTTTAAAAGACAATCGTGAGAAGATTGAA | |
| | AAAATCTTGACTTTTCGAATTCCTTATTATGTTGGTCCATTGGC | |
| | GCGTGGCAATAGTCGTTTTGCATGGATGACTCGGAAGTCTGA | |
| | AGAAACAATTACCCCATGGAATTTTGAAGAAGTTGTCGATAA | |
| | AGGTGCTTCAGCTCAATCATTTATTGAACGCATGACAAACTTT | |
| | GATAAAAATCTTCCAAATGAAAAAGTACTACCAAAACATAGT | |
| | TTGCTTTATGAGTATTTTACGGTTTATAACGAATTGACAAAGG | |
| | TCAAATATGTTACTGAGGGAATGCGAAAACCAGCATTTCTTTC | |
| | AGGTGAACAGAAGAAAGCCATTGTTGATTTACTCTTCAAAAC | |
| | AAATCGAAAAGTAACCGTTAAGCAATTAAAAGAAGATTATTT | |
| | CAAAAAAATAGAATGTTTTGATAGTGTTGAAATTTCAGGAGTT | |
| | GAAGATAGATTTAATGCTTCATTAGGCGCCTACCATGATTTGC | |
| | TAAAAATTATTAAAGATAAAGATTTTTTGGATAATGAAGAAA | |
| | ATGAAGATATCTTAGAGGATATTGTTTTAACATTGACCTTATT | |
| | TGAAGATAGGGGGATGATTGAGGAAAGACTTAAAACATATGC | |
| | TCACCTCTTTGATGATAAGGTGATGAAACAGCTTAAACGTCGC | |
| | CGTTATACTGGTTGGGGACGTTTGTCTCGAAAATTGATTAATG | |
| | GTATTAGGGATAAGCAATCTGGCAAAACAATATTAGATTTTTT | |
| | GAAATCAGATGGTTTTGCCAATCGCAATTTTATGCAGCTGATC | |
| | CATGATGATAGTTTGACATTTAAAGAAGATATTCAAAAAGCA | |
| | CAGGTGTCTGGACAAGGCCATAGTTTACATGAACAGATTGCT | |
| | AACTTAGCTGGCAGTCCTGCTATTAAAAAAGGTATTTTACAGA | |
| | CTGTAAAAATTGTTGATGAACTGGTCAAAGTAATGGGGCATA | |
| | AGCCAGAAAATATCGTTATTGAAATGGCACGTGAAAATCAGA | |
| | CAACTCAAAAGGGCCAGAAAAATTCGCGAGAGCGTATGAAAC | |
| | GAATCGAAGAAGGTATCAAAGAATTAGGAAGTCAGATTCTTA | |
| | AAGAGCATCCTGTTGAAAATACTCAATTGCAAAATGAAAAGC | |
| | TCTATCTCTATTATCTACAAAATGGAAGAGACATGTATGTGGA | |
| | CCAAGAATTAGATATTAATCGTTTAAGTGATTATGATGTCGAT | |
| | CACATTGTTCCACAAAGTTTCATTAAAGACGATTCAATAGACA | |
| | ATAAGGTACTAACGCGTTCTGATAAAAATCGTGGTAAATCGG | |
| | ATAACGTTCCAAGTGAAGAAGTAGTCAAAAAGATGAAAAACT | |
| | ATTGGAGACAACTTCTAAACGCCAAGTTAATCACTCAACGTA | |
| | AGTTTGATAATTTAACGAAAGCTGAACGTGGAGGTTTGAGTG | |
| | AACTTGATAAAGCTGGTTTTATCAAACGCCAATTGGTTGAAAC | |
| | TCGCCAAATCACTAAGCATGTGGCACAAATTTTGGATAGTCGC | |
| | ATGAATACTAAATACGATGAAAATGATAAACTTATTCGAGAG | |
| | GTTAAAGTGATTACCTTAAAATCTAAATTAGTTTCTGACTTCC | |
| | GAAAAGATTTCCAATTCTATAAAGTACGTGAGATTAACAATT | |
| | ACCATCATGCCCATGATGCGTATCTAAATGCCGTCGTTGGAAC | |
| | TGCTTTGATTAAGAAATATCCAAAACTTGAATCGGAGTTTGTC | |
| | TATGGTGATTATAAAGTTTATGATGTTCGTAAAATGATTGCTA | |
| | AGTCTGAGCAAGAAATAGGCAAAGCAACCGCAAAATATTTCT | |
| | TTTACTCTAATATCATGAACTTCTTCAAAACAGAAATTACACT | |
| | TGCAAATGGAGAGATTCGCAAACGCCCTCTAATCGAAACTAA | |
| | TGGGGAAACTGGAGAAATTGTCTGGGATAAAGGGCGAGATTT | |
| | TGCCACAGTGCGCAAAGTATTGTCCATGCCCCAAGTCAATATT | |
| | GTCAAGAAAACAGAAGTACAGACAGGCGGATTCTCCAAGGA | |
| | GTCAATTTTACCAAAAAGAAATTCGGACAAGCTTATTGCTCGT | |
| | AAAAAAGACTGGGATCCAAAAAAATATGGTGGTTTTGATAGT | |
| | CCAACGGTAGCTTATTCAGTCCTAGTGGTTGCTAAGGTGGAAA | |
| | AAGGGAAATCGAAGAAGTTAAAATCCGTTAAAGAGTTACTAG | |
| | GGATCACAATTATGGAAAGAAGTTCCTTTGAAAAAAATCCGA | |
| | TTGACTTTTTAGAAGCTAAAGGATATAAGGAAGTTAAAAAAG | |
| | ACTTAATCATTAAACTACCTAAATATAGTCTTTTTGAGTTAGA | |
| | AAACGGTCGTAAACGGATGCTGGCTAGTGCCGGAGAATTACA | |
| | AAAAGGAAATGAGCTGGCTCTGCCAAGCAAATATGTGAATTT | |
| | TTTATATTTAGCTAGTCATTATGAAAAGTTGAAGGGTAGTCCA | |
| | GAAGATAACGAACAAAAACAATTGTTTGTGGAGCAGCATAAG | |
| | CATTATTTAGATGAGATTATTGAGCAAATCAGTGAATTTTCTA | |
| | AGCGTGTTATTTTAGCAGATGCCAATTTAGATAAAGTTCTTAG | |
| | TGCATATAACAAACATAGAGACAAACCAATACGTGAACAAGC | |
| | AGAAAATATTATTCATTTATTTACGTTGACGAATCTTGGAGCT | |
| | CCCGCTGCTTTTAAATATTTTGATACAACAATTGATCGTAAAC | |
| | GATATACGTCTACAAAAGAAGTTTTAGATGCCACTCTTATCCA | |
| | TCAATCCATCACTGGTCTTTATGAAACACGCATTGATTTGAGT | |
| | CAGCTAGGAGGTGACTGA | |
| SpCas9 | MDKKYSIGLDIGTNSVGWAVITDDYKVPSKKFKVLGNTDRHSIK | SEQ ID NO: 21 |
| Streptococcus | KNLIGALLFGSGETAEATRLKRTARRRYTRRKNRICYLQEIFSNE | |
| pyogenes | MAKVDDSFFHRLEESFLVEEDKKHERHPIFGNIVDEVAYHEKYP | |
| MGAS1882 | TIYHLRKKLADSTDKADLRLIYLALAHMIKFRGHFLIEGDLNPDN | |
| wild type | SDVDKLFIQLVQIYNQLFEENPINASRVDAKAILSARLSKSRRLEN | |
| NC_017053.1 | LIAQLPGEKRNGLFGNLIALSLGLTPNFKSNFDLAEDAKLQLSKD | |
| | TYDDDLDNLLAQIGDQYADLFLAAKNLSDAILLSDILRVNSEITK | |
| | APLSASMIKRYDEHHQDLTLLKALVRQQLPEKYKEIFFDQSKNG | |
| | YAGYIDGGASQEEFYKFIKPILEKMDGTEELLVKLNREDLLRKQR | |
| | TFDNGSIPHQIHLGELHAILRRQEDFYPFLKDNREKIEKILTFRIPY | |
| | YVGPLARGNSRFAWMTRKSEETITPWNFEEVVDKGASAQSFIER | |
| | MTNFDKNLPNEKVLPKHSLLYEYFTVYNELTKVKYVTEGMRKP | |
| | AFLSGEQKKAIVDLLFKTNRKVTVKQLKEDYFKKIECFDSVEISG | |
| | VEDRFNASLGAYHDLLKIIKDKDFLDNEENEDILEDIVLTLTLFED | |
| | RGMIEERLKTYAHLFDDKVMKQLKRRRYTGWGRLSRKLINGIR | |
| | DKQSGKTILDFLKSDGFANRNFMQLIHDDSLTFKEDIQKAQVSG | |
| | QGHSLHEQIANLAGSPAIKKGILQTVKIVDELVKVMGHKPENIVI | |
| | EMARENQTTQKGQKNSRERMKRIEEGIKELGSQILKEHPVENTQ | |
| | LQNEKLYLYYLQNGRDMYVDQELDINRLSDYDVDHIVPQSFIKD | |
| | DSIDNKVLTRSDKNRGKSDNVPSEEVVKKMKNYWRQLLNAKLI | |
| | TQRKFDNLTKAERGGLSELDKAGFIKRQLVETRQITKHVAQILDS | |
| | RMNTKYDENDKLIREVKVITLKSKLVSDFRKDFQFYKVREINNY | |
| | HHAHDAYLNAVVGTALIKKYPKLESEFVYGDYKVYDVRKMIAK | |
| | SEQEIGKATAKYFFYSNIMNFFKTEITLANGEIRKRPLIETNGETG | |
| | EIVWDKGRDFATVRKVLSMPQVNIVKKTEVQTGGFSKESILPKR | |
| | NSDKLIARKKDWDPKKYGGFDSPTVAYSVLVVAKVEKGKSKKL | |
| | KSVKELLGITIMERSSFEKNPIDFLEAKGYKEVKKDLIIKLPKYSLF | |
| | ELENGRKRMLASAGELQKGNELALPSKYVNFLYLASHYEKLKG | |
| | SPEDNEQKQLFVEQHKHYLDEIIEQISEFSKRVILADANLDKVLSA | |
| | YNKHRDKPIREQAENIIHLFTLTNLGAPAAFKYFDTTIDRKRYTST | |
| | KEVLDATLIHQSITGLYETRIDLSQLGGD | |
| SpCas9 | ATGGATAAAAAGTATTCTATTGGTTTAGACATCGGCACTAATT | SEQ ID NO: 22 |
| Streptococcus | CCGTTGGATGGGCTGTCATAACCGATGAATACAAAGTACCTTC | |
| pyogenes wild | AAAGAAATTTAAGGTGTTGGGGAACACAGACCGTCATTCGAT | |
| type | TAAAAAGAATCTTATCGGTGCCCTCCTATTCGATAGTGGCGAA | |
| SWBC2D7W014 | ACGGCAGAGGCGACTCGCCTGAAACGAACCGCTCGGAGAAG | |
| | GTATACACGTCGCAAGAACCGAATATGTTACTTACAAGAAAT | |
| | TTTTAGCAATGAGATGGCCAAAGTTGACGATTCTTTCTTTCAC | |
| | CGTTTGGAAGAGTCCTTCCTTGTCGAAGAGGACAAGAAACAT | |
| | GAACGGCACCCCATCTTTGGAAACATAGTAGATGAGGTGGCA | |
| | TATCATGAAAAGTACCCAACGATTTATCACCTCAGAAAAAAG | |
| | CTAGTTGACTCAACTGATAAAGCGGACCTGAGGTTAATCTACT | |
| | TGGCTCTTGCCCATATGATAAAGTTCCGTGGGCACTTTCTCAT | |
| | TGAGGGTGATCTAAATCCGGACAACTCGGATGTCGACAAACT | |
| | GTTCATCCAGTTAGTACAAACCTATAATCAGTTGTTTGAAGAG | |
| | AACCCTATAAATGCAAGTGGCGTGGATGCGAAGGCTATTCTT | |
| | AGCGCCCGCCTCTCTAAATCCCGACGGCTAGAAAACCTGATC | |
| | GCACAATTACCCGGAGAGAAGAAAAATGGGTTGTTCGGTAAC | |
| | CTTATAGCGCTCTCACTAGGCCTGACACCAAATTTTAAGTCGA | |
| | ACTTCGACTTAGCTGAAGATGCCAAATTGCAGCTTAGTAAGG | |
| | ACACGTACGATGACGATCTCGACAATCTACTGGCACAAATTG | |
| | GAGATCAGTATGCGGACTTATTTTTGGCTGCCAAAAACCTTAG | |
| | CGATGCAATCCTCCTATCTGACATACTGAGAGTTAATACTGAG | |
| | ATTACCAAGGCGCCGTTATCCGCTTCAATGATCAAAAGGTAC | |
| | GATGAACATCACCAAGACTTGACACTTCTCAAGGCCCTAGTCC | |
| | GTCAGCAACTGCCTGAGAAATATAAGGAAATATTCTTTGATC | |
| | AGTCGAAAAACGGGTACGCAGGTTATATTGACGGCGGAGCGA | |
| | GTCAAGAGGAATTCTACAAGTTTATCAAACCCATATTAGAGA | |
| | AGATGGATGGGACGGAAGAGTTGCTTGTAAAACTCAATCGCG | |
| | AAGATCTACTGCGAAAGCAGCGGACTTTCGACAACGGTAGCA | |
| | TTCCACATCAAATCCACTTAGGCGAATTGCATGCTATACTTAG | |
| | AAGGCAGGAGGATTTTTATCCGTTCCTCAAAGACAATCGTGA | |
| | AAAGATTGAGAAAATCCTAACCTTTCGCATACCTTACTATGTG | |
| | GGACCCCTGGCCCGAGGGAACTCTCGGTTCGCATGGATGACA | |
| | AGAAAGTCCGAAGAAACGATTACTCCATGGAATTTTGAGGAA | |
| | GTTGTCGATAAAGGTGCGTCAGCTCAATCGTTCATCGAGAGG | |
| | ATGACCAACTTTGACAAGAATTTACCGAACGAAAAAGTATTG | |
| | CCTAAGCACAGTTTACTTTACGAGTATTTCACAGTGTACAATG | |
| | AACTCACGAAAGTTAAGTATGTCACTGAGGGCATGCGTAAAC | |
| | CCGCCTTTCTAAGCGGAGAACAGAAGAAAGCAATAGTAGATC | |
| | TGTTATTCAAGACCAACCGCAAAGTGACAGTTAAGCAATTGA | |
| | AAGAGGACTACTTTAAGAAAATTGAATGCTTCGATTCTGTCGA | |
| | GATCTCCGGGGTAGAAGATCGATTTAATGCGTCACTTGGTACG | |
| | TATCATGACCTCCTAAAGATAATTAAAGATAAGGACTTCCTGG | |
| | ATAACGAAGAGAATGAAGATATCTTAGAAGATATAGTGTTGA | |
| | CTCTTACCCTCTTTGAAGATCGGGAAATGATTGAGGAAAGACT | |
| | AAAAACATACGCTCACCTGTTCGACGATAAGGTTATGAAACA | |
| | GTTAAAGAGGCGTCGCTATACGGGCTGGGGACGATTGTCGCG | |
| | GAAACTTATCAACGGGATAAGAGACAAGCAAAGTGGTAAAA | |
| | CTATTCTCGATTTTCTAAAGAGCGACGGCTTCGCCAATAGGAA | |
| | CTTTATGCAGCTGATCCATGATGACTCTTTAACCTTCAAAGAG | |
| | GATATACAAAAGGCACAGGTTTCCGGACAAGGGGACTCATTG | |
| | CACGAACATATTGCGAATCTTGCTGGTTCGCCAGCCATCAAAA | |
| | AGGGCATACTCCAGACAGTCAAAGTAGTGGATGAGCTAGTTA | |
| | AGGTCATGGGACGTCACAAACCGGAAAACATTGTAATCGAGA | |
| | TGGCACGCGAAAATCAAACGACTCAGAAGGGGCAAAAAAAC | |
| | AGTCGAGAGCGGATGAAGAGAATAGAAGAGGGTATTAAAGA | |
| | ACTGGGCAGCCAGATCTTAAAGGAGCATCCTGTGGAAAATAC | |
| | CCAATTGCAGAACGAGAAACTTTACCTCTATTACCTACAAAAT | |
| | GGAAGGGACATGTATGTTGATCAGGAACTGGACATAAACCGT | |
| | TTATCTGATTACGACGTCGATCACATTGTACCCCAATCCTTTTT | |
| | GAAGGACGATTCAATCGACAATAAAGTGCTTACACGCTCGGA | |
| | TAAGAACCGAGGGAAAAGTGACAATGTTCCAAGCGAGGAAG | |
| | TCGTAAAGAAAATGAAGAACTATTGGCGGCAGCTCCTAAATG | |
| | CGAAACTGATAACGCAAAGAAAGTTCGATAACTTAACTAAAG | |
| | CTGAGAGGGGTGGCTTGTCTGAACTTGACAAGGCCGGATTTA | |
| | TTAAACGTCAGCTCGTGGAAACCCGCCAAATCACAAAGCATG | |
| | TTGCACAGATACTAGATTCCCGAATGAATACGAAATACGACG | |
| | AGAACGATAAGCTGATTCGGGAAGTCAAAGTAATCACTTTAA | |
| | AGTCAAAATTGGTGTCGGACTTCAGAAAGGATTTTCAATTCTA | |
| | TAAAGTTAGGGAGATAAATAACTACCACCATGCGCACGACGC | |
| | TTATCTTAATGCCGTCGTAGGGACCGCACTCATTAAGAAATAC | |
| | CCGAAGCTAGAAAGTGAGTTTGTGTATGGTGATTACAAAGTTT | |
| | ATGACGTCCGTAAGATGATCGCGAAAAGCGAACAGGAGATAG | |
| | GCAAGGCTACAGCCAAATACTTCTTTTATTCTAACATTATGAA | |
| | TTTCTTTAAGACGGAAATCACTCTGGCAAACGGAGAGATACG | |
| | CAAACGACCTTTAATTGAAACCAATGGGGAGACAGGTGAAAT | |
| | CGTATGGGATAAGGGCCGGGACTTCGCGACGGTGAGAAAAGT | |
| | TTTGTCCATGCCCCAAGTCAACATAGTAAAGAAAACTGAGGT | |
| | GCAGACCGGAGGGTTTTCAAAGGAATCGATTCTTCCAAAAAG | |
| | GAATAGTGATAAGCTCATCGCTCGTAAAAAGGACTGGGACCC | |
| | GAAAAAGTACGGTGGCTTCGATAGCCCTACAGTTGCCTATTCT | |
| | GTCCTAGTAGTGGCAAAAGTTGAGAAGGGAAAATCCAAGAAA | |
| | CTGAAGTCAGTCAAAGAATTATTGGGGATAACGATTATGGAG | |
| | CGCTCGTCTTTTGAAAAGAACCCCATCGACTTCCTTGAGGCGA | |
| | AAGGTTACAAGGAAGTAAAAAAGGATCTCATAATTAAACTAC | |
| | CAAAGTATAGTCTGTTTGAGTTAGAAAATGGCCGAAAACGGA | |
| | TGTTGGCTAGCGCCGGAGAGCTTCAAAAGGGGAACGAACTCG | |
| | CACTACCGTCTAAATACGTGAATTTCCTGTATTTAGCGTCCCA | |
| | TTACGAGAAGTTGAAAGGTTCACCTGAAGATAACGAACAGAA | |
| | GCAACTTTTTGTTGAGCAGCACAAACATTATCTCGACGAAATC | |
| | ATAGAGCAAATTTCGGAATTCAGTAAGAGAGTCATCCTAGCT | |
| | GATGCCAATCTGGACAAAGTATTAAGCGCATACAACAAGCAC | |
| | AGGGATAAACCCATACGTGAGCAGGCGGAAAATATTATCCAT | |
| | TTGTTTACTCTTACCAACCTCGGCGCTCCAGCCGCATTCAAGT | |
| | ATTTTGACACAACGATAGATCGCAAACGATACACTTCTACCA | |
| | AGGAGGTGCTAGACGCGACACTGATTCACCAATCCATCACGG | |
| | GATTATATGAAACTCGGATAGATTTGTCACAGCTTGGGGGTG | |
| | ACGGATCCCCCAAGAAGAAGAGGAAAGTCTCGAGCGACTACA | |
| | AAGACCATGACGGTGATTATAAAGATCATGACATCGATTACA | |
| | AGGATGACGATGACAAGGCTGCAGGA | |
| SpCas9 | MDKKYSIGLDIGTNSVGWAVITDEYKVPSKKFKVLGNTDRHSIK | SEQ ID NO: 23 |
| Streptococcus | KNLIGALLFDSGETAEATRLKRTARRRYTRRKNRICYLQEIFSNE | |
| pyogenes wild | MAKVDDSFFHRLEESFLVEEDKKHERHPIFGNIVDEVAYHEKYP | |
| type | TIYHLRKKLVDSTDKADLRLIYLALAHMIKFRGHFLIEGDLNPDN | |
| Encoded | SDVDKLFIQLVQTYNQLFEENPINASGVDAKAILSARLSKSRRLE | |
| product of | NLIAQLPGEKKNGLFGNLIALSLGLTPNFKSNFDLAEDAKLQLSK | |
| SWBC2D7W014 | DTYDDDLDNLLAQIGDQYADLFLAAKNLSDAILLSDILRVNTEIT | |
| | KAPLSASMIKRYDEHHQDLTLLKALVRQQLPEKYKEIFFDQSKN | |
| | GYAGYIDGGASQEEFYKFIKPILEKMDGTEELLVKLNREDLLRKQ | |
| | RTFDNGSIPHQIHLGELHAILRRQEDFYPFLKDNREKIEKILTFRIP | |
| | YYVGPLARGNSRFAWMTRKSEETITPWNFEEVVDKGASAQSFIE | |
| | RMTNFDKNLPNEKVLPKHSLLYEYFTVYNELTKVKYVTEGMRK | |
| | PAFLSGEQKKAIVDLLFKTNRKVTVKQLKEDYFKKIECFDSVEIS | |
| | GVEDRFNASLGTYHDLLKIIKDKDFLDNEENEDILEDIVLTLTLFE | |
| | DREMIEERLKTYAHLFDDKVMKQLKRRRYTGWGRLSRKLINGIR | |
| | DKQSGKTILDFLKSDGFANRNFMQLIHDDSLTFKEDIQKAQVSG | |
| | QGDSLHEHIANLAGSPAIKKGILQTVKVVDELVKVMGRHKPENI | |
| | VIEMARENQTTQKGQKNSRERMKRIEEGIKELGSQILKEHPVENT | |
| | QLQNEKLYLYYLQNGRDMYVDQELDINRLSDYDVDHIVPQSFL | |
| | KDDSIDNKVLTRSDKNRGKSDNVPSEEVVKKMKNYWRQLLNA | |
| | KLITQRKFDNLTKAERGGLSELDKAGFIKRQLVETRQITKHVAQI | |
| | LDSRMNTKYDENDKLIREVKVITLKSKLVSDFRKDFQFYKVREIN | |
| | NYHHAHDAYLNAVVGTALIKKYPKLESEFVYGDYKVYDVRKMI | |
| | AKSEQEIGKATAKYFFYSNIMNFFKTEITLANGEIRKRPLIETNGE | |
| | TGEIVWDKGRDFATVRKVLSMPQVNIVKKTEVQTGGFSKESILP | |
| | KRNSDKLIARKKDWDPKKYGGFDSPTVAYSVLVVAKVEKGKSK | |
| | KLKSVKELLGITIMERSSFEKNPIDFLEAKGYKEVKKDLIIKLPKY | |
| | SLFELENGRKRMLASAGELQKGNELALPSKYVNFLYLASHYEKL | |
| | KGSPEDNEQKQLFVEQHKHYLDEIIEQISEFSKRVILADANLDKV | |
| | LSAYNKHRDKPIREQAENIIHLFTLTNLGAPAAFKYFDTTIDRKR | |
| | YTSTKEVLDATLIHQSITGLYETRIDLSQLGGDGSPKKKRKVSSD | |
| | YKDHDGDYKDHDIDYKDDDDKAAG | |
| SpCas9 | ATGGATAAGAAATACTCAATAGGCTTAGATATCGGCACAAAT | SEQ ID NO: 24 |
| Streptococcus | AGCGTCGGATGGGCGGTGATCACTGATGAATATAAGGTTCCG | |
| pyogenes | TCTAAAAAGTTCAAGGTTCTGGGAAATACAGACCGCCACAGT | |
| M1GAS wild | ATCAAAAAAAATCTTATAGGGGCTCTTTTATTTGACAGTGGAG | |
| type | AGACAGCGGAAGCGACTCGTCTCAAACGGACAGCTCGTAGAA | |
| NC_002737.2 | GGTATACACGTCGGAAGAATCGTATTTGTTATCTACAGGAGAT | |
| | TTTTTCAAATGAGATGGCGAAAGTAGATGATAGTTTCTTTCAT | |
| | CGACTTGAAGAGTCTTTTTTGGTGGAAGAAGACAAGAAGCAT | |
| | GAACGTCATCCTATTTTTGGAAATATAGTAGATGAAGTTGCTT | |
| | ATCATGAGAAATATCCAACTATCTATCATCTGCGAAAAAAATT | |
| | GGTAGATTCTACTGATAAAGCGGATTTGCGCTTAATCTATTTG | |
| | GCCTTAGCGCATATGATTAAGTTTCGTGGTCATTTTTTGATTG | |
| | AGGGAGATTTAAATCCTGATAATAGTGATGTGGACAAACTAT | |
| | TTATCCAGTTGGTACAAACCTACAATCAATTATTTGAAGAAAA | |
| | CCCTATTAACGCAAGTGGAGTAGATGCTAAAGCGATTCTTTCT | |
| | GCACGATTGAGTAAATCAAGACGATTAGAAAATCTCATTGCT | |
| | CAGCTCCCCGGTGAGAAGAAAAATGGCTTATTTGGGAATCTC | |
| | ATTGCTTTGTCATTGGGTTTGACCCCTAATTTTAAATCAAATTT | |
| | TGATTTGGCAGAAGATGCTAAATTACAGCTTTCAAAAGATACT | |
| | TACGATGATGATTTAGATAATTTATTGGCGCAAATTGGAGATC | |
| | AATATGCTGATTTGTTTTTGGCAGCTAAGAATTTATCAGATGC | |
| | TATTTTACTTTCAGATATCCTAAGAGTAAATACTGAAATAACT | |
| | AAGGCTCCCCTATCAGCTTCAATGATTAAACGCTACGATGAAC | |
| | ATCATCAAGACTTGACTCTTTTAAAAGCTTTAGTTCGACAACA | |
| | ACTTCCAGAAAAGTATAAAGAAATCTTTTTTGATCAATCAAAA | |
| | AACGGATATGCAGGTTATATTGATGGGGGAGCTAGCCAAGAA | |
| | GAATTTTATAAATTTATCAAACCAATTTTAGAAAAAATGGATG | |
| | GTACTGAGGAATTATTGGTGAAACTAAATCGTGAAGATTTGCT | |
| | GCGCAAGCAACGGACCTTTGACAACGGCTCTATTCCCCATCA | |
| | AATTCACTTGGGTGAGCTGCATGCTATTTTGAGAAGACAAGA | |
| | AGACTTTTATCCATTTTTAAAAGACAATCGTGAGAAGATTGAA | |
| | AAAATCTTGACTTTTCGAATTCCTTATTATGTTGGTCCATTGGC | |
| | GCGTGGCAATAGTCGTTTTGCATGGATGACTCGGAAGTCTGA | |
| | AGAAACAATTACCCCATGGAATTTTGAAGAAGTTGTCGATAA | |
| | AGGTGCTTCAGCTCAATCATTTATTGAACGCATGACAAACTTT | |
| | GATAAAAATCTTCCAAATGAAAAAGTACTACCAAAACATAGT | |
| | TTGCTTTATGAGTATTTTACGGTTTATAACGAATTGACAAAGG | |
| | TCAAATATGTTACTGAAGGAATGCGAAAACCAGCATTTCTTTC | |
| | AGGTGAACAGAAGAAAGCCATTGTTGATTTACTCTTCAAAAC | |
| | AAATCGAAAAGTAACCGTTAAGCAATTAAAAGAAGATTATTT | |
| | CAAAAAAATAGAATGTTTTGATAGTGTTGAAATTTCAGGAGTT | |
| | GAAGATAGATTTAATGCTTCATTAGGTACCTACCATGATTTGC | |
| | TAAAAATTATTAAAGATAAAGATTTTTTGGATAATGAAGAAA | |
| | ATGAAGATATCTTAGAGGATATTGTTTTAACATTGACCTTATT | |
| | TGAAGATAGGGAGATGATTGAGGAAAGACTTAAAACATATGC | |
| | TCACCTCTTTGATGATAAGGTGATGAAACAGCTTAAACGTCGC | |
| | CGTTATACTGGTTGGGGACGTTTGTCTCGAAAATTGATTAATG | |
| | GTATTAGGGATAAGCAATCTGGCAAAACAATATTAGATTTTTT | |
| | GAAATCAGATGGTTTTGCCAATCGCAATTTTATGCAGCTGATC | |
| | CATGATGATAGTTTGACATTTAAAGAAGACATTCAAAAAGCA | |
| | CAAGTGTCTGGACAAGGCGATAGTTTACATGAACATATTGCA | |
| | AATTTAGCTGGTAGCCCTGCTATTAAAAAAGGTATTTTACAGA | |
| | CTGTAAAAGTTGTTGATGAATTGGTCAAAGTAATGGGGCGGC | |
| | ATAAGCCAGAAAATATCGTTATTGAAATGGCACGTGAAAATC | |
| | AGACAACTCAAAAGGGCCAGAAAAATTCGCGAGAGCGTATG | |
| | AAACGAATCGAAGAAGGTATCAAAGAATTAGGAAGTCAGATT | |
| | CTTAAAGAGCATCCTGTTGAAAATACTCAATTGCAAAATGAA | |
| | AAGCTCTATCTCTATTATCTCCAAAATGGAAGAGACATGTATG | |
| | TGGACCAAGAATTAGATATTAATCGTTTAAGTGATTATGATGT | |
| | CGATCACATTGTTCCACAAAGTTTCCTTAAAGACGATTCAATA | |
| | GACAATAAGGTCTTAACGCGTTCTGATAAAAATCGTGGTAAA | |
| | TCGGATAACGTTCCAAGTGAAGAAGTAGTCAAAAAGATGAAA | |
| | AACTATTGGAGACAACTTCTAAACGCCAAGTTAATCACTCAA | |
| | CGTAAGTTTGATAATTTAACGAAAGCTGAACGTGGAGGTTTG | |
| | AGTGAACTTGATAAAGCTGGTTTTATCAAACGCCAATTGGTTG | |
| | AAACTCGCCAAATCACTAAGCATGTGGCACAAATTTTGGATA | |
| | GTCGCATGAATACTAAATACGATGAAAATGATAAACTTATTC | |
| | GAGAGGTTAAAGTGATTACCTTAAAATCTAAATTAGTTTCTGA | |
| | CTTCCGAAAAGATTTCCAATTCTATAAAGTACGTGAGATTAAC | |
| | AATTACCATCATGCCCATGATGCGTATCTAAATGCCGTCGTTG | |
| | GAACTGCTTTGATTAAGAAATATCCAAAACTTGAATCGGAGTT | |
| | TGTCTATGGTGATTATAAAGTTTATGATGTTCGTAAAATGATT | |
| | GCTAAGTCTGAGCAAGAAATAGGCAAAGCAACCGCAAAATAT | |
| | TTCTTTTACTCTAATATCATGAACTTCTTCAAAACAGAAATTA | |
| | CACTTGCAAATGGAGAGATTCGCAAACGCCCTCTAATCGAAA | |
| | CTAATGGGGAAACTGGAGAAATTGTCTGGGATAAAGGGCGAG | |
| | ATTTTGCCACAGTGCGCAAAGTATTGTCCATGCCCCAAGTCAA | |
| | TATTGTCAAGAAAACAGAAGTACAGACAGGCGGATTCTCCAA | |
| | GGAGTCAATTTTACCAAAAAGAAATTCGGACAAGCTTATTGC | |
| | TCGTAAAAAAGACTGGGATCCAAAAAAATATGGTGGTTTTGA | |
| | TAGTCCAACGGTAGCTTATTCAGTCCTAGTGGTTGCTAAGGTG | |
| | GAAAAAGGGAAATCGAAGAAGTTAAAATCCGTTAAAGAGTTA | |
| | CTAGGGATCACAATTATGGAAAGAAGTTCCTTTGAAAAAAAT | |
| | CCGATTGACTTTTTAGAAGCTAAAGGATATAAGGAAGTTAAA | |
| | AAAGACTTAATCATTAAACTACCTAAATATAGTCTTTTTGAGT | |
| | TAGAAAACGGTCGTAAACGGATGCTGGCTAGTGCCGGAGAAT | |
| | TACAAAAAGGAAATGAGCTGGCTCTGCCAAGCAAATATGTGA | |
| | ATTTTTTATATTTAGCTAGTCATTATGAAAAGTTGAAGGGTAG | |
| | TCCAGAAGATAACGAACAAAAACAATTGTTTGTGGAGCAGCA | |
| | TAAGCATTATTTAGATGAGATTATTGAGCAAATCAGTGAATTT | |
| | TCTAAGCGTGTTATTTTAGCAGATGCCAATTTAGATAAAGTTC | |
| | TTAGTGCATATAACAAACATAGAGACAAACCAATACGTGAAC | |
| | AAGCAGAAAATATTATTCATTTATTTACGTTGACGAATCTTGG | |
| | AGCTCCCGCTGCTTTTAAATATTTTGATACAACAATTGATCGT | |
| | AAACGATATACGTCTACAAAAGAAGTTTTAGATGCCACTCTTA | |
| | TCCATCAATCCATCACTGGTCTTTATGAAACACGCATTGATTT | |
| | GAGTCAGCTAGGAGGTGACTGA | |
| SpCas9 | MDKKYSIGLDIGTNSVGWAVITDEYKVPSKKFKVLGNTDRHSIK | SEQ ID NO: 25 |
| Streptococcus | KNLIGALLFDSGETAEATRLKRTARRRYTRRKNRICYLQEIFSNE | |
| pyogenes | MAKVDDSFFHRLEESFLVEEDKKHERHPIFGNIVDEVAYHEKYP | |
| M1GAS wild | TIYHLRKKLVDSTDKADLRLIYLALAHMIKFRGHFLIEGDLNPDN | |
| type | SDVDKLFIQLVQTYNQLFEENPINASGVDAKAILSARLSKSRRLE | |
| Encoded | NLIAQLPGEKKNGLFGNLIALSLGLTPNFKSNFDLAEDAKLQLSK | |
| product of | DTYDDDLDNLLAQIGDQYADLFLAAKNLSDAILLSDILRVNTEIT | |
| NC_002737.2 | KAPLSASMIKRYDEHHQDLTLLKALVRQQLPEKYKEIFFDQSKN | |
| (100% identical | GYAGYIDGGASQEEFYKFIKPILEKMDGTEELLVKLNREDLLRKQ | |
| to the canonical | RTFDNGSIPHQIHLGELHAILRRQEDFYPFLKDNREKIEKILTFRIP | |
| Q99ZW2 | YYVGPLARGNSRFAWMTRKSEETITPWNFEEVVDKGASAQSFIE | |
| wild type) | RMTNFDKNLPNEKVLPKHSLLYEYFTVYNELTKVKYVTEGMRK | |
| | PAFLSGEQKKAIVDLLFKTNRKVTVKQLKEDYFKKIECFDSVEIS | |
| | GVEDRFNASLGTYHDLLKIIKDKDFLDNEENEDILEDIVLTLTLFE | |
| | DREMIEERLKTYAHLFDDKVMKQLKRRRYTGWGRLSRKLINGIR | |
| | DKQSGKTILDFLKSDGFANRNFMQLIHDDSLTFKEDIQKAQVSG | |
| | QGDSLHEHIANLAGSPAIKKGILQTVKVVDELVKVMGRHKPENI | |
| | VIEMARENQTTQKGQKNSRERMKRIEEGIKELGSQILKEHPVENT | |
| | QLQNEKLYLYYLQNGRDMYVDQELDINRLSDYDVDHIVPQSFL | |
| | KDDSIDNKVLTRSDKNRGKSDNVPSEEVVKKMKNYWRQLLNA | |
| | KLITQRKFDNLTKAERGGLSELDKAGFIKRQLVETRQITKHVAQI | |
| | LDSRMNTKYDENDKLIREVKVITLKSKLVSDFRKDFQFYKVREIN | |
| | NYHHAHDAYLNAVVGTALIKKYPKLESEFVYGDYKVYDVRKMI | |
| | AKSEQEIGKATAKYFFYSNIMNFFKTEITLANGEIRKRPLIETNGE | |
| | TGEIVWDKGRDFATVRKVLSMPQVNIVKKTEVQTGGFSKESILP | |
| | KRNSDKLIARKKDWDPKKYGGFDSPTVAYSVLVVAKVEKGKSK | |
| | KLKSVKELLGITIMERSSFEKNPIDFLEAKGYKEVKKDLIIKLPKY | |
| | SLFELENGRKRMLASAGELQKGNELALPSKYVNFLYLASHYEKL | |
| | KGSPEDNEQKQLFVEQHKHYLDEIIEQISEFSKRVILADANLDKV | |
| | LSAYNKHRDKPIREQAENIIHLFTLTNLGAPAAFKYFDTTIDRKR | |
| | YTSTKEVLDATLIHQSITGLYETRIDLSQLGGD | |

[0374] The multi-flap prime editors described herein may include any of the above SpCas9 sequences, or any variant thereof having at least 80%, at least 85%, at least 90%, at least 95%, or at least 99% sequence identity thereto.

[0375] B. Wild Type Cas9 Orthologs

[0376] In other embodiments, the Cas9 protein can be a wild type Cas9 ortholog from another bacterial species different from the canonical Cas9 from S. pyogenes. For example, the following Cas9 orthologs can be used in connection with the multi-flap prime editor constructs described in this specification. In addition, any variant Cas9 orthologs having at least 80%, at least 85%, at least 90%, at least 95%, or at least 99% sequence identity to any of the below orthologs may also be used with the multi-flap present prime editors.

| Description | Sequence |
|---|---|
| LfCas9 | MKEYHIGLDIGTSSIGWAVTDSQFKLMRIKGKTAIGVRLFEEGKTAAERRTFRT |
| Lactobacillus | TRRRLKRRKWRLHYLDEIFAPHLQEVDENFLRRLKQSNIHPEDPTKNQAFIGKL |
| fermentum | LFPDLLKKNERGYPTLIKMRDELPVEQRAHYPVMNIYKLREAMINEDRQFDLRE |
| wild type | VYLAVHHIVKYRGHFLNNASVDKFKVGRIDFDKSFNVLNEAYEELQNGEGSFTI |
| GenBank: | EPSKVEKIGQLLLDTKMRKLDRQKAVAKLLEVKVADKEETKRNKQIATAMSK |
| SNX31424.11 | LVLGYKADFATVAMANGNEWKIDLSSETSEDEIEKFREELSDAQNDILTEITSLF |
| | SQIMLNEIVPNGMSISESMMDRYWTHERQLAEVKEYLATQPASARKEFDQVYN |
| | KYIGQAPKERGFDLEKGLKKILSKKENWKEIDELLKAGDFLPKQRTSANGVIPH |
| | QMHQQELDRIIEKQAKYYPWLATENPATGERDRHQAKYELDQLVSFRIPYYVG |
| | PLVTPEVQKATSGAKFAWAKRKEDGEITPWNLWDKIDRAESAEAFIKRMTVKD |
| | TYLLNEDVLPANSLLYQKYNVLNELNNVRVNGRRLSVGIKQDIYTELFKKKKT |
| | VKASDVASLVMAKTRGVNKPSVEGLSDPKKFNSNLATYLDLKSIVGDKVDDN |
| | RYQTDLENIIEWRSVFEDGEIFADKLTEVEWLTDEQRSALVKKRYKGWGRLSK |
| | KLLTGIVDENGQRIIDLMWNTDQNFKEIVDQPVFKEQIDQLNQKAITNDGMTLR |
| | ERVESVLDDAYTSPQNKKAIWQVVRVVEDIVKAVGNAPKSISIEFARNEGNKGE |
| | ITRSRRTQLQKLFEDQAHELVKDTSLTEELEKAPDLSDRYYFYFTQGGKDMYT |
| | GDPINFDEISTKYDIDHILPQSFVKDNSLDNRVLTSRKENNKKSDQVPAKLYAA |
| | KMKPYWNQLLKQGLITQRKFENLTKDVDQNIKYRSLGFVKRQLVETRQVIKLT |
| | ANILGSMYQEAGTEIIETRAGLTKQLREEFDLPKVREVNDYHHAVDAYLTTFAG |
| | QYLNRRYPKLRSFFVYGEYMKFKHGSDLKLRNFNFFHELMEGDKSQGKVVDQ |
| | QTGELITTRDEVAKSFDRLLNMKYMLVSKEVHDRSDQLYGATIVTAKESGKLT |
| | SPIEIKKNRLVDLYGAYTNGTSAFMTIIKFTGNKPKYKVIGIPTTSAASLKRAGKP |
| | GSESYNQELHRIIKSNPKVKKGFEIVVPHVSYGQLIVDGDCKFTLASPTVQHPAT |
| | QLVLSKKSLETISSGYKILKDKPAIANERLIRVFDEVVGQMNRYFTIFDQRSNRQ |
| | KVADARDKFLSLPTESKYEGAKKVQVGKTEVITNLLMGLHANATQGDLKVLG |
| | LATFGFFQSTTGLSLSEDTMIVYQSPTGLFERRICLKDI (SEQ ID NO: 26) |
| SaCas9 | MDKKYSIGLDIGTNSVGWAVITDEYKVPSKKFKVLGNTDRHSIKKNLIGALLFD |
| Staphylococcus | SGETAEATRLKRTARRRYTRRKNRICYLQEIFSNEMAKVDDSFFHRLEESFLVEE |
| aureus | DKKHERHPIFGNIVDEVAYHEKYPTIYHLRKKLVDSTDKADLRLIYLALAHMIK |
| wild type | FRGHFLIEGDLNPDNSDVDKLFIQLVQTYNQLFEENPINASGVDAKAILSARLSK |
| GenBank: | SRRLENLIAQLPGEKKNGLFGNLIALSLGLTPNFKSNFDLAEDAKLQLSKDTYD |
| AYD60528.1 | DDLDNLLAQIGDQYADLFLAAKNLSDAILLSDILRVNTEITKAPLSASMIKRYDE |
| | HHQDLTLLKALVRQQLPEKYKEIFFDQSKNGYAGYIDGGASQEEFYKFIKPILEK |
| | MDGTEELLVKLNREDLLRKQRTFDNGSIPHQIHLGELHAILRRQEDFYPFLKDN |
| | REKIEKILTFRIPYYVGPLARGNSRFAWMTRKSEETITPWNFEEVVDKGASAQSF |
| | IERMTNFDKNLPNEKVLPKHSLLYEYFTVYNELTKVKYVTEGMRKPAFLSGEQ |
| | KKAIVDLLFKTNRKVTVKQLKEDYFKKIECFDSVEISGVEDRFNASLGTYHDLL |
| | KIIKDKDFLDNEENEDILEDIVLTLTLFEDREMIEERLKTYAHLFDDKVMKQLKR |
| | RRYTGWGRLSRKLINGIRDKQSGKTILDFLKSDGFANRNFMQLIHDDSLTFKEDI |
| | QKAQVSGQGDSLHEHIANLAGSPAIKKGILQTVKVVDELVKVMGRHKPENIVIE |
| | MARENQTTQKGQKNSRERMKRIEEGIKELGSQILKEHPVENTQLQNEKLYLYY |
| | LQNGRDMYVDQELDINRLSDYDVDHIVPQSFLKDDSIDNKVLTRSDKNRGKSD |
| | NVPSEEVVKKMKNYWRQLLNAKLITQRKFDNLTKAERGGLSELDKAGFIKRQL |
| | VETRQITKHVAQILDSRMNTKYDENDKLIREVKVITLKSKLVSDFRKDFQFYKV |
| | REINNYHHAHDAYLNAVVGTALIKKYPKLESEFVYGDYKVYDVRKMIAKSEQ |
| | EIGKATAKYFFYSNIMNFFKTEITLANGEIRKRPLIETNGETGEIVWDKGRDFAT |
| | VRKVLSMPQVNIVKKTEVQTGGFSKESILPKRNSDKLIARKKDWDPKKYGGFD |
| | SPTVAYSVLVVAKVEKGKSKKLKSVKELLGITIMERSSFEKNPIDFLEAKGYKE |
| | VKKDLIIKLPKYSLFELENGRKRMLASAGELQKGNELALPSKYVNFLYLASHYE |
| | KLKGSPEDNEQKQLFVEQHKHYLDEIIEQISEFSKRVILADANLDKVLSAYNKH |
| | RDKPIREQAENIIHLFTLTNLGAPAAFKYFDTTIDRKRYTSTKEVLDATLIHQSIT |
| | GLYETRIDLSQLGGD (SEQ ID NO: 27) |
| SaCas9 | MGKRNYILGLDIGITSVGYGIIDYETRDVIDAGVRLFKEANVENNEGRRSKRGA |
| Staphylococcus | RRLKRRRRHRIQRVKKLLFDYNLLTDHSELSGINPYEARVKGLSQKLSEEEFSA |
| aureus | ALLHLAKRRGVHNVNEVEEDTGNELSTKEQISRNSKALEEKYVAELQLERLKK |
| | DGEVRGSINRFKTSDYVKEAKQLLKVQKAYHQLDQSFIDTYIDLLETRRTYYEG |
| | PGEGSPFGWKDIKEWYEMLMGHCTYFPEELRSVKYAYNADLYNALNDLNNLV |
| | ITRDENEKLEYYEKFQIIENVFKQKKKPTLKQIAKEILVNEEDIKGYRVTSTGKPE |
| | FTNLKVYHDIKDITARKEIIENAELLDQIAKILTIYQSSEDIQEELTNLNSELTQEEI |
| | EQISNLKGYTGTHNLSLKAINLILDELWHTNDNQIAIFNRLKLVPKKVDLSQQKE |
| | IPTTLVDDFILSPVVKRSFIQSIKVINAIIKKYGLPNDIIIELAREKNSKDAQKMINE |
| | MQKRNRQTNERIEEIIRTTGKENAKYLIEKIKLHDMQEGKCLYSLEAIPLEDLLN |
| | NPFNYEVDHIIPRSVSFDNSFNNKVLVKQEENSKKGNRTPFQYLSSSDSKISYETF |
| | KKHILNLAKGKGRISKTKKEYLLEERDINRFSVQKDFINRNLVDTRYATRGLMN |
| | LLRSYFRVNNLDVKVKSINGGFTSFLRRKWKFKKERNKGYKHHAEDALIIANA |
| | DFIFKEWKKLDKAKKVMENQMFEEKQAESMPEIETEQEYKEIFITPHQIKHIKDF |
| | KDYKYSHRVDKKPNRKLINDTLYSTRKDDKGNTLIVNNLNGLYDKDNDKLKK |
| | LINKSPEKLLMYHHDPQTYQKLKLIMEQYGDEKNPLYKYYEETGNYLTKYSKK |
| | DNGPVIKKIKYYGNKLNAHLDITDDYPNSRNKVVKLSLKPYRFDVYLDNGVYK |
| | FVTVKNLDVIKKENYYEVNSKCYEEAKKLKKISNQAEFIASFYKNDLIKINGEL |
| | YRVIGVNNDLLNRIEVNMIDITYREYLENMNDKRPPHIIKTIASKTQSIKKYSTDI |
| | LGNLYEVKSKKHPQIIKK |
| | (SEQ ID NO: 28) |
| StCas9 | MLFNKCIIISINLDFSNKEKCMTKPYSIGLDIGTNSVGWAVITDNYKVPSKKMKV |
| | LGNTSKKYIKKNLLGVLLFDSGITAEGRRLKRTARRRYTRRRNRILYLQEIFSTE |
| | MATLDDAFFQRLDDSFLVPDDKRDSKYPIFGNLVEEKVYHDEFPTIYHLRKYLA |
| Streptococcus | DSTKKADLRLVYLALAHMIKYRGHFLIEGEFNSKNNDIQKNFQDFLDTYNAIFE |
| thermophilus | SDLSLENSKQLEEIVKDKISKLEKKDRILKLFPGEKNSGIFSEFLKLIVGNQADFR |
| UniProtKB/ | KCFNLDEKASLHFSKESYDEDLETLLGYIGDDYSDVFLKAKKLYDAILLSGFLT |
| Swiss-Prot: | VTDNETEAPLSSAMIKRYNEHKEDLALLKEYIRNISLKTYNEVFKDDTKNGYAG |
| G3ECR1.2 | YIDGKTNQEDFYVYLKNLLAEFEGADYFLEKIDREDFLRKQRTFDNGSIPYQIHL |
| Wild type | QEMRAILDKQAKFYPFLAKNKERIEKILTFRIPYYVGPLARGNSDFAWSIRKRNE |
| | KITPWNFEDVIDKESSAEAFINRMTSFDLYLPEEKVLPKHSLLYETFNVYNELTK |
| | VRFIAESMRDYQFLDSKQKKDIVRLYFKDKRKVTDKDIIEYLHAIYGYDGIELK |
| | GIEKQFNSSLSTYHDLLNIINDKEFLDDSSNEAIIEEIIHTLTIFEDREMIKQRLSKF |
| | ENIFDKSVLKKLSRRHYTGWGKLSAKLINGIRDEKSGNTILDYLIDDGISNRNFM |
| | QLIHDDALSFKKKIQKAQIIGDEDKGNIKEVVKSLPGSPAIKKGILQSIKIVDELV |
| | KVMGGRKPESIVVEMARENQYTNQGKSNSQQRLKRLEKSLKELGSKILKENIPA |
| | KLSKIDNNALQNDRLYLYYLQNGKDMYTGDDLDIDRLSNYDIDHIIPQAFLKDN |
| | SIDNKVLVSSASNRGKSDDFPSLEVVKKRKTFWYQLLKSKLISQRKFDNLTKAE |
| | RGGLLPEDKAGFIQRQLVETRQITKHVARLLDEKFNNKKDENNRAVRTVKIITL |
| | KSTLVSQFRKDFELYKVREINDFHHAHDAYLNAVIASALLKKYPKLEPEFVYGD |
| | YPKYNSFRERKSATEKVYFYSNIMNIFKKSISLADGRVIERPLIEVNEETGESVW |
| | NKESDLATVRRVLSYPQVNVVKKVEEQNHGLDRGKPKGLFNANLSSKPKPNSN |
| | ENLVGAKEYLDPKKYGGYAGISNSFAVLVKGTIEKGAKKKITNVLEFQGISILD |
| | RINYRKDKLNFLLEKGYKDIELIIELPKYSLFELSDGSRRMLASILSTNNKRGEIH |
| | KGNQIFLSQKFVKLLYHAKRISNTINENHRKYVENHKKEFEELFYYILEFNENYV |
| | GAKKNGKLLNSAFQSWQNHSIDELCSSFIGPTGSERKGLFELTSRGSAADFEFLG |
| | VKIPRYRDYTPSSLLKDATLIHQSVTGLYETRIDLAKLGEG (SEQ ID NO: 29) |
| LcCas9 | MKIKNYNLALTPSTSAVGHVEVDDDLNILEPVHHQKAIGVAKFGEGETAEARR |
| Lactobacillus | LARSARRTTKRRANRINHYFNEIMKPEIDKVDPLMFDRIKQAGLSPLDERKEFRT |
| crispatus | VIFDRPNIASYYHNQFPTIWHLQKYLMITDEKADIRLIYWALHSLLKHRGHFFNT |
| NCBI | TPMSQFKPGKLNLKDDMLALDDYNDLEGLSFAVANSPEIEKVIKDRSMHKKEK |
| Reference | IAELKKLIVNDVPDKDLAKRNNKIITQIVNAIMGNSFHLNFIFDMDLDKLTSKA |
| Sequence: | WSFKLDDPELDTKFDAISGSMTDNQIGIFETLQKIYSAISLLDILNGSSNVVDAKN |
| WP_133478044.1 | ALYDKHKRDLNLYFKFLNTLPDEIAKTLKAGYTLYIGNRKKDLLAARKLLKVN |
| Wild type | VAKNFSQDDFYKLINKELKSIDKQGLQTRFSEKVGELVAQNNFLPVQRSSDNVF |
| | IPYQLNAITFNKILENQGKYYDFLVKPNPAKKDRKNAPYELSQLMQFTIPYYVG |
| | PLVTPEEQVKSGIPKTSRFAWMVRKDNGAITPWNFYDKVDIEATADKFIKRSIA |
| | KDSYLLSELVLPKHSLLYEKYEVFNELSNVSLDGKKLSGGVKQILFNEVFKKTN |
| | KVNTSRILKALAKHNIPGSKITGLSNPEEFTSSLQTYNAWKKYFPNQIDNFAYQQ |
| | DLEKMIEWSTVFEDHKILAKKLDEIEWLDDDQKKFVANTRLRGWGRLSKRLLT |
| | GLKDNYGKSIMQRLETTKANFQQIVYKPEFREQIDKISQAAAKNQSLEDILANS |
| | YTSPSNRKAIRKTMSVVDEYIKLNHGKEPDKIFLMFQRSEQEKGKQTEARSKQL |
| | NRILSQLKADKSANKLFSKQLADEFSNAIKKSKYKLNDKQYFYFQQLGRDALT |
| | GEVIDYDELYKYTVLHIIPRSKLTDDSQNNKVLTKYKIVDGSVALKFGNSYSDA |
| | LGMPIKAFWTELNRLKLIPKGKLLNLTTDFSTLNKYQRDGYIARQLVETQQIVK |
| | LLATIMQSRFKHTKIIEVRNSQVANIRYQFDYFRIKNLNEYYRGFDAYLAAVVG |
| | TYLYKVYPKARRLFVYGQYLKPKKTNQENQDMHLDSEKKSQGFNFLWNLLYG |
| | KQDQIFVNGTDVIAFNRKDLITKMNTVYNYKSQKISLAIDYHNGAMFKATLFPR |
| | NDRDTAKTRKLIPKKKDYDTDIYGGYTSNVDGYMLLAEIIKRDGNKQYGFYGV |
| | PSRLVSELDTLKKTRYTEYEEKLKEIIKPELGVDLKKIKKIKILKNKVPFNQVIID |
| | KGSKFFITSTSYRWNYRQLILSAESQQTLMDLVVDPDFSNHKARKDARKNADE |
| | RLIKVYEEILYQVKNYMPMFVELHRCYEKLVDAQKTFKSLKISDKAMVLNQILI |
| | LLHSNATSPVLEKLGYHTRFTLGKKHNLISENAVLVTQSITGLKENHVSIKQML |
| | (SEQ ID NO: 30) |
| PdCas9 | MTNEKYSIGLDIGTSSIGFAVVNDNNRVIRVKGKNAIGVRLFDEGKAAADRRSF |
| Pedicoccus | RTTRRSFRTTRRRLSRRRWRLKLLREIFDAYITPVDEAFFIRLKESNLSPKDSKKQ |
| damnosus | YSGDILFNDRSDKDFYEKYPTIYHLRNALMTEHRKFDVREIYLAIHHIMKFRGH |
| NCBI | FLNATPANNFKVGRLNLEEKFEELNDIYQRVFPDESIEFRTDNLEQIKEVLLDNK |
| Reference | RSRADRQRTLVSDIYQSSEDKDIEKRNKAVATEILKASLGNKAKLNVITNVEVD |
| Sequence: | KEAAKEWSITFDSESIDDDLAKIEGQMTDDGHEIIEVLRSLYSGITLSAIVPENHT |
| WP_062913273.1 | LSQSMVAKYDLHKDHLKLFKKLINGMTDTKKAKNLRAAYDGYIDGVKGKVLP |
| Wild type | QEDFYKQVQVNLDDSAEANEIQTYIDQDIFMPKQRTKANGSIPHQLQQQELDQI |
| | IENQKAYYPWLAELNPNPDKKRQQLAKYKLDELVTFRVPYYVGPMITAKDQK |
| | NQSGAEFAWMIRKEPGNITPWNFDQKVDRMATANQFIKRMTTTDTYLLGEDV |
| | LPAQSLLYQKFEVLNELNKIRIDHKPISIEQKQQIFNDLFKQFKNVTIKHLQDYLV |
| | SQGQYSKRPLIEGLADEKRFNSSLSTYSDLCGIFGAKLVEENDRQEDLEKIIEWS |
| | TIFEDKKIYRAKLNDLTWLTDDQKEKLATKRYQGWGRLSRKLLVGLKNSEHR |
| | NIMDILWITNENFMQIQAEPDFAKLVTDANKGMLEKTDSQDVINDLYTSPQNK |
| | KAIRQILLVVHDIQNAMHGQAPAKIHVEFARGEERNPRRSVQRQRQVEAAYEK |
| | VSNELVSAKVRQEFKEAINNKRDFKDRLFLYFMQGGIDIYTGKQLNIDQLSSYQI |
| | DHILPQAFVKDDSLTNRVLTNENQVKADSVPIDIFGKKMLSVWGRMKDQGLIS |
| | KGKYRNLTMNPENISAHTENGFINRQLVETRQVIKLAVNILADEYGDSTQIISVK |
| | ADLSHQMREDFELLKNRDVNDYHHAFDAYLAAFIGNYLLKRYPKLESYFVYG |
| | DFKKFTQKETKMRRFNFIYDLKHCDQVVNKETGEILWTKDEDIKYIRHLFAYK |
| | KILVSHEVREKRGALYNQTIYKAKDDKGSGQESKKLIRIKDDKETKIYGGYSGK |
| | SLAYMTIVQITKKNKVSYRVIGIPTLALARLNKLENDSTENNGELYKIIKPQFTH |
| | YKVDKKNGEIIETTDDFKIVVSKVRFQQLIDDAGQFFMLASDTYKNNAQQLVIS |
| | NNALKAINNTNITDCPRDDLERLDNLRLDSAFDEIVKKMDKYFSAYDANNFRE |
| | KIRNSNLIFYQLPVEDQWENNKITELGKRTVLTRILQGLHANATTTDMSIFKIKT |
| | PFGQLRQRSGISLSENAQLIYQSPTGLFERRVQLNKIK (SEQ ID NO: 31) |
| FnCas9 | MKKQKFSDYYLGFDIGTNSVGWCVTDLDYNVLRFNKKDMWGSRLFEEAKTA |
| Fusobaterium | AERRVQRNSRRRLKRRKWRLNLLEEIFSNEILKIDSNFFRRLKESSLWLEDKSSK |
| nucleatum | EKFTLFNDDNYKDYDFYKQYPTIFHLRNELIKNPEKKDIRLVYLAIHSIFKSRGH |
| NCBI | FLFEGQNLKEIKNFETLYNNLIAFLEDNGINKIIDKNNIEKLEKIVCDSKKGLKDK |
| Reference | EKEFKEIFNSDKQLVAIFKLSVGSSVSLNDLFDTDEYKKGEVEKEKISFREQIYED |
| Sequence: | DKPIYYSILGEKIELLDIAKTFYDFMVLNNILADSQYISEAKVKLYEEHKKDLKN |
| WP_060798984.1 | LKYIIRKYNKGNYDKLFKDKNENNYSAYIGLNKEKSKKEVIEKSRLKIDDLIKNI |
| | KGYLPKVEEIEEKDKAIFNKILNKIELKTILPKQRISDNGTLPYQIHEAELEKILEN |
| | QSKYYDFLNYEENGIITKDKLLMTFKFRIPYYVGPLNSYHKDKGGNSWIVRKEE |
| | GKILPWNFEQKVDIEKSAEEFIKRMTNKCTYLNGEDVIPKDTFLYSEYVILNELN |
| | KVQVNDEFLNEENKRKIIDELFKENKKVSEKKFKEYLLVKQIVDGTIELKGVKD |
| | SFNSNYISYIRFKDIFGEKLNLDIYKEISEKSILWKCLYGDDKKIFEKKIKNEYGDI |
| | LTKDEIKKINTFKFNNWGRLSEKLLTGIEFINLETGECYSSVMDALRRTNYNLM |
| | ELLSSKFTLQESINNENKEMNEASYRDLIEESYVSPSLKRAIFQTLKIYEEIRKITG |
| | RVPKKVFIEMARGGDESMKNKKIPARQEQLKKLYDSCGNDIANFSIDIKEMKNS |
| | LISYDNNSLRQKKLYLYYLQFGKCMYTGREIDLDRLLQNNDTYDIDHIYPRSKV |
| | IKDDSFDNLVLVLKNENAEKSNEYPVKKEIQEKMKSFWRFLKEKNFISDEKYKR |
| | LTGKDDFELRGFMARQLVNVRQTTKEVGKILQQIEPEIKIVYSKAEIASSFREMF |
| | DFIKVRELNDTHHAKDAYLNIVAGNVYNTKFTEKPYRYLQEIKENYDVKKIYN |
| | YDIKNAWDKENSLEIVKKNMEKNTVNITRFIKEKKGQLFDLNPIKKGETSNEIISI |
| | KPKVYNGKDDKLNEKYGYYKSLNPAYFLYVEHKEKNKRIKSFERVNLVDVNN |
| | IKDEKSLVKYLIENKKLVEPRVIKKVYKRQVILINDYPYSIVTLDSNKLMDFENL |
| | KPLFLENKYEKILKNVIKFLEDNQGKSEENYKFIYLKKKDRYEKNETLESVKDR |
| | YNLEFNEMYDKFLEKLDSKDYKNYMNNKKYQELLDVKEKFIKLNLFDKAFTL |
| | KSFLDLFNRKTMADFSKVGLTKYLGKIQKISSNVLSKNELYLLEESVTGLFVKKI |
| | KL (SEQ ID NO: 32) |
| EcCas9 | RRKQRIQILQELLGEEVLKTDPGFFHRMKESRYVVEDKRTLDGKQVELPYALFV |
| Enterococcus | DKDYTDKEYYKQFPTINHLIVYLMTTSDTPDIRLVYLALHYYMKNRGNFLHSG |
| cecorum | DINNVKDINDILEQLDNVLETFLDGWNLKLKSYVEDIKNIYNRDLGRGERKKAF |
| NCBI | VNTLGAKTKAEKAFCSLISGGSTNLAELFDDSSLKEIETPKIEFASSSLEDKIDGIQ |
| Reference | EALEDRFAVIEAAKRLYDWKTLTDILGDSSSLAEARVNSYQMHHEQLLELKSL |
| Sequence: | VKEYLDRKVFQEVFVSLNVANNYPAYIGHTKINGKKKELEVKRTKRNDFYSYV |
| WP_047338501.1 | KKQVIEPIKKKVSDEAVLTKLSEIESLIEVDKYLPLQVNSDNGVIPYQVKLNELT |
| Wild type | RIFDNLENRIPVLRENRDKIIKTFKFRIPYYVGSLNGVVKNGKCTNWMVRKEEG |
| | KIYPWNFEDKVDLEASAEQFIRRMTNKCTYLVNEDVLPKYSLLYSKYLVLSELN |
| | NLRIDGRPLDVKIKQDIYENVFKKNRKVTLKKIKKYLLKEGIITDDDELSGLADD |
| | VKSSLTAYRDFKEKLGHLDLSEAQMENIILNITLFGDDKKLLKKRLAALYPFIDD |
| | KSLNRIATLNYRDWGRLSERFLSGITSVDQETGELRTIIQCMYETQANLMQLLA |
| | EPYHFVEAIEKENPKVDLESISYRIVNDLYVSPAVKRQIWQTLLVIKDIKQVMKH |
| | DPERIFIEMAREKQESKKTKSRKQVLSEVYKKAKEYEHLFEKLNSLTEEQLRSK |
| | KIYLYFTQLGKCMYSGEPIDFENLVSANSNYDIDHIYPQSKTIDDSFNNIVLVKK |
| | SLNAYKSNHYPIDKNIRDNEKVKTLWNTLVSKGLITKEKYERLIRSTPFSDEELA |
| | GFIARQLVETRQSTKAVAEILSNWFPESEIVYSKAKNVSNFRQDFEILKVRELND |
| | CHHAHDAYLNIVVGNAYHTKFTNSPYRFIKNKANQEYNLRKLLQKVNKIESNG |
| | VVAWVGQSENNPGTIATVKKVIRRNTVLISRMVKEVDGQLFDLTLMKKGKGQ |
| | VPIKSSDERLTDISKYGGYNKATGAYFTFVKSKKRGKVVRSFEYVPLHLSKQFE |
| | NNNELLKEYIEKDRGLTDVEILIPKVLINSLFRYNGSLVRITGRGDTRLLLVHEQP |
| | LYVSNSFVQQLKSVSSYKLKKSENDNAKLTKTATEKLSNIDELYDGLLRKLDLP |
| | IYSYWFSSIKEYLVESRTKYIKLSIEEKALVIFEILHLFQSDAQVPNLKILGLSTKP |
| | SRIRIQKNLKDTDKMSIIHQSPSGIFEHEIELTSL (SEQ ID NO: 33) |
| AhCas9 | MQNGFLGITVSSEQVGWAVTNPKYELERASRKDLWGVRLFDKAETAEDRRMF |
| Anaerostipes | RTNRRLNQRKKNRIHYLRDIFHEEVNQKDPNFFQQLDESNFCEDDRTVEFNFDT |
| hadrus | NLYKNQFPTVYHLRKYLMETKDKPDIRLVYLAFSKFMKNRGHFLYKGNLGEV |
| NCBI | MDFENSMKGFCESLEKFNIDFPTLSDEQVKEVRDILCDHKIAKTVKKKNIITITK |
| Reference | VKSKTAKAWIGLFCGCSVPVKVLFQDIDEEIVTDPEKISFEDASYDDYIANIEKG |
| Sequence: | VGIYYEAIVSAKMLFDWSILNEILGDHQLLSDAMIAEYNKHHDDLKRLQKIIKG |
| WP_044924278.1 | TGSRELYQDIFINDVSGNYVCYVGHAKTMSSADQKQFYTFLKNRLKNVNGISSE |
| Wild type | DAEWIDTEIKNGTLLPKQTKRDNSVIPHQLQLREFELILDNMQEMYPFLKENRE |
| | KLLKIFNFVIPYYVGPLKGVVRKGESTNWMVPKKDGVIHPWNFDEMVDKEAS |
| | AECFISRMTGNCSYLFNEKVLPKNSLLYETFEVLNELNPLKINGEPISVELKQRIY |
| | EQLFLTGKKVTKKSLTKYLIKNGYDKDIELSGIDNEFHSNLKSHIDFEDYDNLSD |
| | EEVEQIILRITVFEDKQLLKDYLNREFVKLSEDERKQICSLSYKGWGNLSEMLLN |
| | GITVTDSNGVEVSVMDMLWNTNLNLMQILSKKYGYKAEIEHYNKEHEKTIYNR |
| | EDLMDYLNIPPAQRRKVNQLITIVKSLKKTYGVPNKIFFKISREHQDDPKRTSSR |
| | KEQLKYLYKSLKSEDEKHLMKELDELNDHELSNDKVYLYFLQKGRCIYSGKKL |
| | NLSRLRKSNYQNDIDYIYPLSAVNDRSMNNKVLTGIQENRADKYTYFPVDSEIQ |
| | KKMKGFWMELVLQGFMTKEKYFRLSRENDFSKSELVSFIEREISDNQQSGRMIA |
| | SVLQYYFPESKIVFVKEKLISSFKRDFHLISSYGHNHLQAAKDAYITIVVGNVYH |
| | TKFTMDPAIYFKNHKRKDYDLNRLFLENISRDGQIAWESGPYGSIQTVRKEYAQ |
| | NHIAVTKRVVEVKGGLFKQMPLKKGHGEYPLKTNDPRFGNIAQYGGYTNVTG |
| | SYFVLVESMEKGKKRISLEYVPVYLHERLEDDPGHKLLKEYLVDHRKLNHPKIL |
| | LAKVRKNSLLKIDGFYYRLNGRSGNALILTNAVELIMDDWQTKTANKISGYMK |
| | RRAIDKKARVYQNEFHIQELEQLYDFYLDKLKNGVYKNRKNNQAELIHNEKEQ |
| | FMELKTEDQCVLLTEIKKLFVCSPMQADLTLIGGSKHTGMIAMSSNVTKADFA |
| | VIAEDPLGLRNKVIYSHKGEK (SEQ ID NO: 34) |
| KvCas9 | MSQNNNKIYNIGLDIGDASVGWAVVDEHYNLLKRHGKHMWGSRLFTQANTA |
| Kandleria | VERRSSRSTRRRYNKRRERIRLLREIMEDMVLDVDPTFFIRLANVSFLDQEDKK |
| vitulina | DYLKENYHSNYNLFIDKDFNDKTYYDKYPTIYHLRKHLCESKEKEDPRLIYLAL |
| NCBI | HHIVKYRGNFLYEGQKFSMDVSNIEDKMIDVLRQFNEINLFEYVEDRKKIDEVL |
| Reference | NVLKEPLSKKHKAEKAFALFDTTKDNKAAYKELCAALAGNKFNVTKMLKEAE |
| Sequence: | LHDEDEKDISFKFSDATFDDAFVEKQPLLGDCVEFIDLLHDIYSWVELQNILGSA |
| WP_031589969.1 | HTSEPSISAAMIQRYEDHKNDLKLLKDVIRKYLPKKYFEVFRDEKSKKNNYCNY |
| Wild type | INHPSKTPVDEFYKYIKKLIEKIDDPDVKTILNKIELESFMLKQNSRTNGAVPYQ |
| | MQLDELNKILENQSVYYSDLKDNEDKIRSILTFRIPYYFGPLNITKDRQFDWIIKK |
| | EGKENERILPWNANEIVDVDKTADEFIKRMRNFCTYFPDEPVMAKNSLTVSKY |
| | EVLNEINKLRINDHLIKRDMKDKMLHTLFMDHKSISANAMKKWLVKNQYFSN |
| | TDDIKIEGFQKENACSTSLTPWIDFTKIFGKINESNYDFIEKIIYDVTVFEDKKILR |
| | RRLKKEYDLDEEKIKKILKLKYSGWSRLSKKLLSGIKTKYKDSTRTPETVLEVM |
| | ERTNMNLMQVINDEKLGFKKTIDDANSTSVSGKFSYAEVQELAGSPAIKRGIWQ |
| | ALLIVDEIKKIMKHEPAHVYIEFARNEDEKERKDSFVNQMLKLYKDYDFEDETE |
| | KEANKHLKGEDAKSKIRSERLKLYYTQMGKCMYTGKSLDIDRLDTYQVDHIVP |
| | QSLLKDDSIDNKVLVLSSENQRKLDDLVIPSSIRNKMYGFWEKLFNNKIISPKKF |
| | YSLIKTEFNEKDQERFINRQIVETRQITKHVAQIIDNHYENTKVVTVRADLSHQF |
| | RERYHIYKNRDINDFHHAHDAYIATILGTYIGHRFESLDAKYIYGEYKRIFRNQK |
| | NKGKEMKKNNDGFILNSMRNIYADKDTGEIVWDPNYIDRIKKCFYYKDCFVTK |
| | KLEENNGTFFNVTVLPNDTNSDKDNTLATVPVNKYRSNVNKYGGFSGVNSFIV |
| | AIKGKKKKGKKVIEVNKLTGIPLMYKNADEEIKINYLKQAEDLEEVQIGKEILK |
| | NQLIEKDGGLYYIVAPTEIINAKQLILNESQTKLVCEIYKAMKYKNYDNLDSEKI |
| | IDLYRLLINKMELYYPEYRKQLVKKFEDRYEQLKVISIEEKCNIIKQILATLHCNS |
| | SIGKIMYSDFKISTTIGRLNGRTISLDDISFIAESPTGMYSKKYKL (SEQ ID NO: |
| | 35) |
| EfCas9 | MRLFEEGHTAEDRRLKRTARRRISRRRNRLRYLQAFFEEAMTDLDENFFARLQE |
| Enterococcus | SFLVPEDKKWHRHPIFAKLEDEVAYHETYPTIYHLRKKLADSSEQADLRLIYLA |
| faecalis | LAHIVKYRGHFLIEGKLSTENTSVKDQFQQFMVIYNQTFVNGESRLVSAPLPESV |
| NCBI | LIEEELTEKASRTKKSEKVLQQFPQEKANGLFGQFLKLMVGNKADFKKVFGLE |
| Reference | EEAKITYASESYEEDLEGILAKVGDEYSDVFLAAKNVYDAVELSTILADSDKKS |
| Sequence: | HAKLSSSMIVRFTEHQEDLKKFKRFIRENCPDEYDNLFKNEQKDGYAGYIAHAG |
| WP_016631044.1 | KVSQLKFYQYVKKIIQDIAGAEYFLEKIAQENFLRKQRTFDNGVIPHQIHLAELQ |
| Wild type | AIIHRQAAYYPFLKENQEKIEQLVTFRIPYYVGPLSKGDASTFAWLKRQSEEPIRP |
| | WNLQETVDLDQSATAFIERMTNFDTYLPSEKVLPKHSLLYEKFMVFNELTKISY |
| | TDDRGIKANFSGKEKEKIFDYLFKTRRKVKKKDIIQFYRNEYNTEIVTLSGLEED |
| | QFNASFSTYQDLLKCGLTRAELDHPDNAEKLEDIIKILTIFEDRQRIRTQLSTFKG |
| | QFSAEVLKKLERKHYTGWGRLSKKLINGIYDKESGKTILDYLVKDDGVSKHYN |
| | RNFMQLINDSQLSFKNAIQKAQSSEHEETLSETVNELAGSPAIKKGIYQSLKIVD |
| | ELVAIMGYAPKRIVVEMARENQTTSTGKRRSIQRLKIVEKAMAEIGSNLLKEQP |
| | TTNEQLRDTRLFLYYMQNGKDMYTGDELSLHRLSHYDIDHIIPQSFMKDDSLD |
| | NLVLVGSTENRGKSDDVPSKEVVKDMKAYWEKLYAAGLISQRKFQRLTKGEQ |
| | GGLTLEDKAHFIQRQLVETRQITKNVAGILDQRYNAKSKEKKVQIITLKASLTSQ |
| | FRSIFGLYKVREVNDYHHGQDAYLNCVVATTLLKVYPNLAPEFVYGEYPKFQT |
| | FKENKATAKAIIYTNLLRFFTEDEPRFTKDGEILWSNSYLKTIKKELNYHQMNIV |
| | KKVEVQKGGFSKESIKPKGPSNKLIPVKNGLDPQKYGGFDSPVVAYTVLFTHEK |
| | GKKPLIKQEILGITIMEKTRFEQNPILFLEEKGFLRPRVLMKLPKYTLYEFPEGRR |
| | RLLASAKEAQKGNQMVLPEHLLTLLYHAKQCLLPNQSESLAYVEQHQPEFQEI |
| | LERVVDFAEVHTLAKSKVQQIVKLFEANQTADVKEIAASFIQLMQFNAMGAPS |
| | TFKFFQKDIERARYTSIKEIFDATIIYQSPTGLYETRRKVVD (SEQ ID NO: 36) |
| Staphylococcus | KRNYILGLDIGITSVGYGIIDYETRDVIDAGVRLFKEANVENNEGRRSKRGARRL |
| aureus | KRRRRHRIQRVKKLLFDYNLLTDHSELSGINPYEARVKGLSQKLSEEEFSAALL |
| Cas9 | HLAKRRGVHNVNEVEEDTGNELSTKEQISRNSKALEEKYVAELQLERLKKDGE |
| | VRGSINRFKTSDYVKEAKQLLKVQKAYHQLDQSFIDTYIDLLETRRTYYEGPGE |
| | GSPFGWKDIKEWYEMLMGHCTYFPEELRSVKYAYNADLYNALNDLNNLVITR |
| | DENEKLEYYEKFQIIENVFKQKKKPTLKQIAKEILVNEEDIKGYRVTSTGKPEFT |
| | NLKVYHDIKDITARKEIIENAELLDQIAKILTIYQSSEDIQEELTNLNSELTQEEIE |
| | QISNLKGYTGTHNLSLKAINLILDELWHTNDNQIAIFNRLKLVPKKVDLSQQKEI |
| | PTTLVDDFILSPVVKRSFIQSIKVINAIIKKYGLPNDIIIELAREKNSKDAQKMINE |
| | MQKRNRQTNERIEEIIRTTGKENAKYLIEKIKLHDMQEGKCLYSLEAIPLEDLLN |
| | NPFNYEVDHIIPRSVSFDNSFNNKVLVKQEENSKKGNRTPFQYLSSSDSKISYETF |
| | KKHILNLAKGKGRISKTKKEYLLEERDINRFSVQKDFINRNLVDTRYATRGLMN |
| | LLRSYFRVNNLDVKVKSINGGFTSFLRRKWKFKKERNKGYKHHAEDALIIANA |
| | DFIFKEWKKLDKAKKVMENQMFEEKQAESMPEIETEQEYKEIFITPHQIKHIKDF |
| | KDYKYSHRVDKKPNRELINDTLYSTRKDDKGNTLIVNNLNGLYDKDNDKLKK |
| | LINKSPEKLLMYHHDPQTYQKLKLIMEQYGDEKNPLYKYYEETGNYLTKYSKK |
| | DNGPVIKKIKYYGNKLNAHLDITDDYPNSRNKVVKLSLKPYRFDVYLDNGVYK |
| | FVTVKNLDVIKKENYYEVNSKCYEEAKKLKKISNQAEFIASFYNNDLIKINGEL |
| | YRVIGVNNDLLNRIEVNMIDITYREYLENMNDKRPPRIIKTIASKTQSIKKYSTDI |
| | LGNLYEVKSKKHPQIIKKG |
| | (SEQ ID NO: 37) |
| Geobacillus | MKYKIGLDIGITSIGWAVINLDIPRIEDLGVRIFDRAENPKTGESLALPRRLARSA |
| thermo- | RRRLRRRKHRLERIRRLFVREGILTKEELNKLFEKKHEIDVWQLRVEALDRKLN |
| denitrificans | NDELARILLHLAKRRGFRSNRKSERTNKENSTMLKHIEENQSILSSYRTVAEMV |
| Cas9 | VKDPKFSLHKRNKEDNYTNTVARDDLEREIKLIFAKQREYGNIVCTEAFEHEYIS |
| | IWASQRPFASKDDIEKKVGFCTFEPKEKRAPKATYTFQSFTVWEHINKLRLVSP |
| | GGIRALTDDERRLIYKQAFHKNKITFHDVRTLLNLPDDTRFKGLLYDRNTTLKE |
| | NEKVRFLELGAYHKIRKAIDSVYGKGAAKSFRPIDFDTFGYALTMFKDDTDIRS |
| | YLRNEYEQNGKRMENLADKVYDEELIEELLNLSFSKFGHLSLKALRNILPYMEQ |
| | GEVYSTACERAGYTFTGPKKKQKTVLLPNIPPIANPVVMRALTQARKVVNAIIK |
| | KYGSPVSIHIELARELSQSFDERRKMQKEQEGNRKKNETAIRQLVEYGLTLNPT |
| | GLDIVKFKLWSEQNGKCAYSLQPIEIERLLEPGYTEVDHVIPYSRSLDDSYTNKV |
| | LVLTKENREKGNRTPAEYLGLGSERWQQFETFVLTNKQFSKKKRDRLLRLHYD |
| | ENEENEFKNRNLNDTRYISRFLANFIREHLKFADSDDKQKVYTVNGRITAHLRS |
| | RWNFNKNREESNLHHAVDAAIVACTTPSDIARVTAFYQRREQNKELSKKTDPQ |
| | FPQPWPHFADELQARLSKNPKESIKALNLGNYDNEKLESLQPVFVSRMPKRSIT |
| | GAAHQETLRRYIGIDERSGKIQTVVKKKLSEIQLDKTGHFPMYGKESDPRTYEAI |
| | RQRLLEHNNDPKKAFQEPLYKPKKNGELGPIIRTIKIIDTTNQVIPLNDGKTVAY |
| | NSNIVRVDVFEKDGKYYCVPIYTIDMMKGILPNKAIEPNKPYSEWKEMTEDYTF |
| | RFSLYPNDLIRIEFPREKTIKTAVGEEIKIKDLFAYYQTIDSSNGGLSLVSHDNNFS |
| | LRSIGSRTLKRFEKYQVDVLGNIYKVRGEKRVGVASSSHSKAGETIRPL |
| | (SEQ ID NO: 38) |
| ScCas9 | MEKKYSIGLDIGTNSVGWAVITDDYKVPSKKFKVLGNTNRKSIKKNLMGALLF |
| S. canis | DSGETAEATRLKRTARRRYTRRKNRIRYLQEIFANEMAKLDDSFFQRLEESFLV |
| 1375 AA | EEDKKNERHPIFGNLADEVAYHRNYPTIYHLRKKLADSPEKADLRLIYLALAHII |
| 159.2 kDa | KFRGHFLIEGKLNAENSDVAKLFYQLIQTYNQLFEESPLDEIEVDAKGILSARLS |
| | KSKRLEKLIAVFPNEKKNGLFGNIIALALGLTPNFKSNFDLTEDAKLQLSKDTYD |
| | DDLDELLGQIGDQYADLFSAAKNLSDAILLSDILRSNSEVTKAPLSASMVKRYD |
| | EHHQDLALLKTLVRQQFPEKYAEIFKDDTKNGYAGYVGIGIKHRKRTTKLATQ |
| | EEFYKFIKPILEKMDGAEELLAKLNRDDLLRKQRTFDNGSIPHQIHLKELHAILR |
| | RQEEFYPFLKENREKIEKILTFRIPYYVGPLARGNSRFAWLTRKSEEAITPWNFEE |
| | VVDKGASAQSFIERMTNFDEQLPNKKVLPKHSLLYEYFTVYNELTKVKYVTER |
| | MRKPEFLSGEQKKAIVDLLFKTNRKVTVKQLKEDYFKKIECFDSVEIIGVEDRFN |
| | ASLGTYHDLLKIIKDKDFLDNEENEDILEDIVLTLTLFEDREMIEERLKTYAHLFD |
| | DKVMKQLKRRHYTGWGRLSRKMINGIRDKQSGKTILDFLKSDGFSNRNFMQLI |
| | HDDSLTFKEEIEKAQVSGQGDSLHEQIADLAGSPAIKKGILQTVKIVDELVKVM |
| | GHKPENIVIEMARENQTTTKGLQQSRERKKRIEEGIKELESQILKENPVENTQLQ |
| | NEKLYLYYLQNGRDMYVDQELDINRLSDYDVDHIVPQSFIKDDSIDNKVLTRSV |
| | ENRGKSDNVPSEEVVKKMKNYWRQLLNAKLITQRKFDNLTKAERGGLSEADK |
| | AGFIKRQLVETRQITKHVARILDSRMNTKRDKNDKPIREVKVITLKSKLVSDFRK |
| | DFQLYKVRDINNYHHAHDAYLNAVVGTALIKKYPKLESEFVYGDYKVYDVRK |
| | MIAKSEQEIGKATAKRFFYSNIMNFFKTEVKLANGEIRKRPLIETNGETGEVVW |
| | NKEKDFATVRKVLAMPQVNIVKKTEVQTGGFSKESILSKRESAKLIPRKKGWD |
| | TRKYGGFGSPTVAYSILVVAKVEKGKAKKLKSVKVLVGITIMEKGSYEKDPIGF |
| | LEAKGYKDIKKELIFKLPKYSLFELENGRRRMLASATELQKANELVLPQHLVRL |
| | LYYTQNISATTGSNNLGYIEQHREEFKEIFEKIIDFSEKYILKNKVNSNLKSSFDE |
| | QFAVSDSILLSNSFVSLLKYTSFGASGGFTFLDLDVKQGRLRYQTVTEVLDATLI |
| | YQSITGLYETRTDLSQLGGD (SEQ ID NO: 39) |

[0377] The multi-flap prime editors described herein may include any of the above Cas9 ortholog sequences, or any variants thereof having at least 80%, at least 85%, at least 90%, at least 95%, or at least 99% sequence identity thereto.

[0378] The napDNAbp may include any suitable homologs and/or orthologs or naturally occurring enzymes, such as, Cas9. Cas9 homologs and/or orthologs have been described in various species, including, but not limited to, S. pyogenes and S. thermophilus. Preferably, the Cas moiety is configured (e.g, mutagenized, recombinantly engineered, or otherwise obtained from nature) as a nickase, i.e., capable of cleaving only a single strand of the target double-stranded DNA. Additional suitable Cas9 nucleases and sequences will be apparent to those of skill in the art based on this disclosure, and such Cas9 nucleases and sequences include Cas9 sequences from the organisms and loci disclosed in Chylinski, Rhun, and Charpentier, “The tracrRNA and Cas9 families of type II CRISPR-Cas immunity systems” (2013) RNA Biology 10:5, 726-737; the entire contents of which are incorporated herein by reference. In some embodiments, a Cas9 nuclease has an inactive (e.g., an inactivated) DNA cleavage domain; that is, the Cas9 is a nickase. In some embodiments, the Cas9 protein comprises an amino acid sequence that is at least 80% identical to the amino acid sequence of a Cas9 protein as provided by any one of the variants of Table 3. In some embodiments, the Cas9 protein comprises an amino acid sequence that is at least 85%, at least 90%, at least 92%, at least 95%, at least 96%, at least 97%, at least 98%, at least 99%, or at least 99.5% identical to the amino acid sequence of a Cas9 protein as provided by any one of the Cas9 orthologs in the above tables.

[0379] C. Dead Cas9 Variant

[0380] In certain embodiments, the multi-flap prime editors described herein may include a dead Cas9, e.g., dead SpCas9, which has no nuclease activity due to one or more mutations that inactive both nuclease domains of Cas9, namely the RuvC domain (which cleaves the non-protospacer DNA strand) and HNH domain (which cleaves the protospacer DNA strand). The nuclease inactivation may be due to one or mutations that result in one or more substitutions and/or deletions in the amino acid sequence of the encoded protein, or any variants thereof having at least 80%, at least 85%, at least 90%, at least 95%, or at least 99% sequence identity thereto.

[0381] As used herein, the term “dCas9” refers to a nuclease-inactive Cas9 or nuclease-dead Cas9, or a functional fragment thereof, and embraces any naturally occurring dCas9 from any organism, any naturally-occurring dCas9 equivalent or functional fragment thereof, any dCas9 homolog, ortholog, or paralog from any organism, and any mutant or variant of a dCas9, naturally-occurring or engineered. The term dCas9 is not meant to be particularly limiting and may be referred to as a “dCas9 or equivalent.” Exemplary dCas9 proteins and method for making dCas9 proteins are further described herein and/or are described in the art and are incorporated herein by reference.

[0382] In other embodiments, dCas9 corresponds to, or comprises in part or in whole, a Cas9 amino acid sequence having one or more mutations that inactivate the Cas9 nuclease activity. In other embodiments, Cas9 variants having mutations other than DlOA and H840A are provided which may result in the full or partial inactivation of the endogeneous Cas9 nuclease activity (e.g., nCas9 or dCas9, respectively). Such mutations, by way of example, include other amino acid substitutions at D10 and H840, or other substitutions within the nuclease domains of Cas9 (e.g., substitutions in the HNH nuclease subdomain and/or the RuvC1 subdomain) with reference to a wild type sequence such as Cas9 from Streptococcus pyogenes (NCBI Reference Sequence: NC_017053.1). In some embodiments, variants or homologues of Cas9 (e.g., variants of Cas9 from Streptococcus pyogenes (NCBI Reference Sequence: NC_017053.1 (SEQ ID NO: 20))) are provided which are at least about 70% identical, at least about 80% identical, at least about 90% identical, at least about 95% identical, at least about 98% identical, at least about 99% identical, at least about 99.5% identical, or at least about 99.9% identical to NCBI Reference Sequence: NC_017053.1. In some embodiments, variants of dCas9 (e.g., variants of NCBI Reference Sequence: NC_017053.1 (SEQ ID NO: 20)) are provided having amino acid sequences which are shorter, or longer than NC_017053.1 (SEQ ID NO: 20) by about 5 amino acids, by about 10 amino acids, by about 15 amino acids, by about 20 amino acids, by about 25 amino acids, by about 30 amino acids, by about 40 amino acids, by about 50 amino acids, by about 75 amino acids, by about 100 amino acids or more.

[0383] In one embodiment, the dead Cas9 may be based on the canonical SpCas9 sequence of Q99ZW2 and may have the following sequence, which comprises a D10X and an H810X, wherein X may be any amino acid, substitutions (underlined and bolded), or a variant be variant of SEQ ID NO: 40 having at least 80%, at least 85%, at least 90%, at least 95%, or at least 99% sequence identity thereto.

[0384] In one embodiment, the dead Cas9 may be based on the canonical SpCas9 sequence of Q99ZW2 and may have the following sequence, which comprises a DlOA and an H810A substitutions (underlined and bolded), or be a variant of SEQ ID NO: 41 having at least 80%, at least 85%, at least 90%, at least 95%, or at least 99% sequence identity thereto.

| Description | Sequence | SEQ ID NO: |
|---|---|---|
| dead Cas9 or | MDKKYSIGLXIGTNSVGWAVITDEYKVPSKKFKVLGNTDRHSIK | SEQ ID NO: 40 |
| dCas9 | KNLIGALLFDSGETAEATRLKRTARRRYTRRKNRICYLQEIFSNE | |
| Streptococcus | MAKVDDSFFHRLEESFLVEEDKKHERHPIFGNIVDEVAYHEKYP | |
| pyogenes | TIYHLRKKLVDSTDKADLRLIYLALAHMIKFRGHFLIEGDLNPDN | |
| Q99ZW2 Cas9 | SDVDKLFIQLVQTYNQLFEENPINASGVDAKAILSARLSKSRRLE | |
| with D10X and | NLIAQLPGEKKNGLFGNLIALSLGLTPNFKSNFDLAEDAKLQLSK | |
| H810X | DTYDDDLDNLLAQIGDQYADLFLAAKNLSDAILLSDILRVNTEIT | |
| Where “X” is | KAPLSASMIKRYDEHHQDLTLLKALVRQQLPEKYKEIFFDQSKN | |
| any amino acid | GYAGYIDGGASQEEFYKFIKPILEKMDGTEELLVKLNREDLLRKQ | |
| | RTFDNGSIPHQIHLGELHAILRRQEDFYPFLKDNREKIEKILTFRIP | |
| | YYVGPLARGNSRFAWMTRKSEETITPWNFEEVVDKGASAQSFIE | |
| | RMTNFDKNLPNEKVLPKHSLLYEYFTVYNELTKVKYVTEGMRK | |
| | PAFLSGEQKKAIVDLLFKTNRKVTVKQLKEDYFKKIECFDSVEIS | |
| | GVEDRFNASLGTYHDLLKIIKDKDFLDNEENEDILEDIVLTLTLFE | |
| | DREMIEERLKTYAHLFDDKVMKQLKRRRYTGWGRLSRKLINGIR | |
| | DKQSGKTILDFLKSDGFANRNFMQLIHDDSLTFKEDIQKAQVSG | |
| | QGDSLHEHIANLAGSPAIKKGILQTVKVVDELVKVMGRHKPENI | |
| | VIEMARENQTTQKGQKNSRERMKRIEEGIKELGSQILKEHPVENT | |
| | QLQNEKLYLYYLQNGRDMYVDQELDINRLSDYDVDXIVPQSFL | |
| | KDDSIDNKVLTRSDKNRGKSDNVPSEEVVKKMKNYWRQLLNA | |
| | KLITQRKFDNLTKAERGGLSELDKAGFIKRQLVETRQITKHVAQI | |
| | LDSRMNTKYDENDKLIREVKVITLKSKLVSDFRKDFQFYKVREIN | |
| | NYHHAHDAYLNAVVGTALIKKYPKLESEFVYGDYKVYDVRKMI | |
| | AKSEQEIGKATAKYFFYSNIMNFFKTEITLANGEIRKRPLIETNGE | |
| | TGEIVWDKGRDFATVRKVLSMPQVNIVKKTEVQTGGFSKESILP | |
| | KRNSDKLIARKKDWDPKKYGGFDSPTVAYSVLVVAKVEKGKSK | |
| | KLKSVKELLGITIMERSSFEKNPIDFLEAKGYKEVKKDLIIKLPKY | |
| | SLFELENGRKRMLASAGELQKGNELALPSKYVNFLYLASHYEKL | |
| | KGSPEDNEQKQLFVEQHKHYLDEIIEQISEFSKRVILADANLDKV | |
| | LSAYNKHRDKPIREQAENIIHLFTLTNLGAPAAFKYFDTTIDRKR | |
| | YTSTKEVLDATLIHQSITGLYETRIDLSQLGGD | |
| dead Cas9 or | MDKKYSIGLAIGTNSVGWAVITDEYKVPSKKFKVLGNTDRHSIK | SEQ ID NO: 41 |
| dCas9 | KNLIGALLFDSGETAEATRLKRTARRRYTRRKNRICYLQEIFSNE | |
| Streptococcus | MAKVDDSFFHRLEESFLVEEDKKHERHPIFGNIVDEVAYHEKYP | |
| pyogenes | TIYHLRKKLVDSTDKADLRLIYLALAHMIKFRGHFLIEGDLNPDN | |
| Q99ZW2 Cas9 | SDVDKLFIQLVQTYNQLFEENPINASGVDAKAILSARLSKSRRLE | |
| with D10A and | NLIAQLPGEKKNGLFGNLIALSLGLTPNFKSNFDLAEDAKLQLSK | |
| H810A | DTYDDDLDNLLAQIGDQYADLFLAAKNLSDAILLSDILRVNTEIT | |
| | KAPLSASMIKRYDEHHQDLTLLKALVRQQLPEKYKEIFFDQSKN | |
| | GYAGYIDGGASQEEFYKFIKPILEKMDGTEELLVKLNREDLLRKQ | |
| | RTFDNGSIPHQIHLGELHAILRRQEDFYPFLKDNREKIEKILTFRIP | |
| | YYVGPLARGNSRFAWMTRKSEETITPWNFEEVVDKGASAQSFIE | |
| | RMTNFDKNLPNEKVLPKHSLLYEYFTVYNELTKVKYVTEGMRK | |
| | PAFLSGEQKKAIVDLLFKTNRKVTVKQLKEDYFKKIECFDSVEIS | |
| | GVEDRFNASLGTYHDLLKIIKDKDFLDNEENEDILEDIVLTLTLFE | |
| | DREMIEERLKTYAHLFDDKVMKQLKRRRYTGWGRLSRKLINGIR | |
| | DKQSGKTILDFLKSDGFANRNFMQLIHDDSLTFKEDIQKAQVSG | |
| | QGDSLHEHIANLAGSPAIKKGILQTVKVVDELVKVMGRHKPENI | |
| | VIEMARENQTTQKGQKNSRERMKRIEEGIKELGSQILKEHPVENT | |
| | QLQNEKLYLYYLQNGRDMYVDQELDINRLSDYDVDAIVPQSFL | |
| | KDDSIDNKVLTRSDKNRGKSDNVPSEEVVKKMKNYWRQLLNA | |
| | KLITQRKFDNLTKAERGGLSELDKAGFIKRQLVETRQITKHVAQI | |
| | LDSRMNTKYDENDKLIREVKVITLKSKLVSDFRKDFQFYKVREIN | |
| | NYHHAHDAYLNAVVGTALIKKYPKLESEFVYGDYKVYDVRKMI | |
| | AKSEQEIGKATAKYFFYSNIMNFFKTEITLANGEIRKRPLIETNGE | |
| | TGEIVWDKGRDFATVRKVLSMPQVNIVKKTEVQTGGFSKESILP | |
| | KRNSDKLIARKKDWDPKKYGGFDSPTVAYSVLVVAKVEKGKSK | |
| | KLKSVKELLGITIMERSSFEKNPIDFLEAKGYKEVKKDLIIKLPKY | |
| | SLFELENGRKRMLASAGELQKGNELALPSKYVNFLYLASHYEKL | |
| | KGSPEDNEQKQLFVEQHKHYLDEIIEQISEFSKRVILADANLDKV | |
| | LSAYNKHRDKPIREQAENIIHLFTLTNLGAPAAFKYFDTTIDRKR | |
| | YTSTKEVLDATLIHQSITGLYETRIDLSQLGGD | |

[0385] D. Cas9 Nickase Variant

[0386] In one embodiment, the multi-flap prime editors described herein comprise a Cas9 nickase. The term “Cas9 nickase” or “nCas9” refers to a variant of Cas9 which is capable of introducing a single-strand break in a double strand DNA molecule target. In some embodiments, the Cas9 nickase comprises only a single functioning nuclease domain The wild type Cas9 (e.g., the canonical SpCas9) comprises two separate nuclease domains, namely, the RuvC domain (which cleaves the non-protospacer DNA strand) and HNH domain (which cleaves the protospacer DNA strand). In one embodiment, the Cas9 nickase comprises a mutation in the RuvC domain which inactivates the RuvC nuclease activity. For example, mutations in aspartate (D) 10, histidine (H) 983, aspartate (D) 986, or glutamate (E) 762, have been reported as loss-of-function mutations of the RuvC nuclease domain and the creation of a functional Cas9 nickase (e.g., Nishimasu et al., “Crystal structure of Cas9 in complex with guide RNA and target DNA,” Cell 156(5), 935-949, which is incorporated herein by reference). Thus, nickase mutations in the RuvC domain could include D10X, H983X, D986X, or E762X, wherein X is any amino acid other than the wild type amino acid. In certain embodiments, the nickase could be D10A, H983A, D986A, or E762A, or a combination thereof.

[0387] In various embodiments, the Cas9 nickase can have a mutation in the RuvC nuclease domain and have one of the following amino acid sequences, or a variant thereof having an amino acid sequence that has at least 80%, at least 85%, at least 90%, at least 95%, or at least 99% sequence identity thereto.

| Description | Sequence | SEQ ID NO: |
|---|---|---|
| Cas9 nickase | MDKKYSIGLXIGTNSVGWAVITDEYKVPSKKFKVLGNTDRHSIK | SEQ ID NO: 42 |
| Streptococcus | KNLIGALLFDSGETAEATRLKRTARRRYTRRKNRICYLQEIFSNE | |
| pyogenes | MAKVDDSFFHRLEESFLVEEDKKHERHPIFGNIVDEVAYHEKYP | |
| Q99ZW2 Cas9 | TIYHLRKKLVDSTDKADLRLIYLALAHMIKFRGHFLIEGDLNPDN | |
| with D10X, | SDVDKLFIQLVQTYNQLFEENPINASGVDAKAILSARLSKSRRLE | |
| wherein X is | NLIAQLPGEKKNGLFGNLIALSLGLTPNFKSNFDLAEDAKLQLSK | |
| any alternate | DTYDDDLDNLLAQIGDQYADLFLAAKNLSDAILLSDILRVNTEIT | |
| amino acid | KAPLSASMIKRYDEHHQDLTLLKALVRQQLPEKYKEIFFDQSKN | |
| | GYAGYIDGGASQEEFYKFIKPILEKMDGTEELLVKLNREDLLRKQ | |
| | RTFDNGSIPHQIHLGELHAILRRQEDFYPFLKDNREKIEKILTFRIP | |
| | YYVGPLARGNSRFAWMTRKSEETITPWNFEEVVDKGASAQSFIE | |
| | RMTNFDKNLPNEKVLPKHSLLYEYFTVYNELTKVKYVTEGMRK | |
| | PAFLSGEQKKAIVDLLFKTNRKVTVKQLKEDYFKKIECFDSVEIS | |
| | GVEDRFNASLGTYHDLLKIIKDKDFLDNEENEDILEDIVLTLTLFE | |
| | DREMIEERLKTYAHLFDDKVMKQLKRRRYTGWGRLSRKLINGIR | |
| | DKQSGKTILDFLKSDGFANRNFMQLIHDDSLTFKEDIQKAQVSG | |
| | QGDSLHEHIANLAGSPAIKKGILQTVKVVDELVKVMGRHKPENI | |
| | VIEMARENQTTQKGQKNSRERMKRIEEGIKELGSQILKEHPVENT | |
| | QLQNEKLYLYYLQNGRDMYVDQELDINRLSDYDVDHIVPQSFL | |
| | KDDSIDNKVLTRSDKNRGKSDNVPSEEVVKKMKNYWRQLLNA | |
| | KLITQRKFDNLTKAERGGLSELDKAGFIKRQLVETRQITKHVAQI | |
| | LDSRMNTKYDENDKLIREVKVITLKSKLVSDFRKDFQFYKVREIN | |
| | NYHHAHDAYLNAVVGTALIKKYPKLESEFVYGDYKVYDVRKMI | |
| | AKSEQEIGKATAKYFFYSNIMNFFKTEITLANGEIRKRPLIETNGE | |
| | TGEIVWDKGRDFATVRKVLSMPQVNIVKKTEVQTGGFSKESILP | |
| | KRNSDKLIARKKDWDPKKYGGFDSPTVAYSVLVVAKVEKGKSK | |
| | KLKSVKELLGITIMERSSFEKNPIDFLEAKGYKEVKKDLIIKLPKY | |
| | SLFELENGRKRMLASAGELQKGNELALPSKYVNFLYLASHYEKL | |
| | KGSPEDNEQKQLFVEQHKHYLDEIIEQISEFSKRVILADANLDKV | |
| | LSAYNKHRDKPIREQAENIIHLFTLTNLGAPAAFKYFDTTIDRKR | |
| | YTSTKEVLDATLIHQSITGLYETRIDLSQLGGD | |
| Cas9 nickase | MDKKYSIGLDIGTNSVGWAVITDEYKVPSKKFKVLGNTDRHSIK | SEQ ID NO: 43 |
| Streptococcus | KNLIGALLFDSGETAEATRLKRTARRRYTRRKNRICYLQEIFSNE | |
| pyogenes | MAKVDDSFFHRLEESFLVEEDKKHERHPIFGNIVDEVAYHEKYP | |
| Q99ZW2 Cas9 | TIYHLRKKLVDSTDKADLRLIYLALAHMIKFRGHFLIEGDLNPDN | |
| with E762X, | SDVDKLFIQLVQTYNQLFEENPINASGVDAKAILSARLSKSRRLE | |
| wherein X is | NLIAQLPGEKKNGLFGNLIALSLGLTPNFKSNFDLAEDAKLQLSK | |
| any alternate | DTYDDDLDNLLAQIGDQYADLFLAAKNLSDAILLSDILRVNTEIT | |
| amino acid | KAPLSASMIKRYDEHHQDLTLLKALVRQQLPEKYKEIFFDQSKN | |
| | GYAGYIDGGASQEEFYKFIKPILEKMDGTEELLVKLNREDLLRKQ | |
| | RTFDNGSIPHQIHLGELHAILRRQEDFYPFLKDNREKIEKILTFRIP | |
| | YYVGPLARGNSRFAWMTRKSEETITPWNFEEVVDKGASAQSFIE | |
| | RMTNFDKNLPNEKVLPKHSLLYEYFTVYNELTKVKYVTEGMRK | |
| | PAFLSGEQKKAIVDLLFKTNRKVTVKQLKEDYFKKIECFDSVEIS | |
| | GVEDRFNASLGTYHDLLKIIKDKDFLDNEENEDILEDIVLTLTLFE | |
| | DREMIEERLKTYAHLFDDKVMKQLKRRRYTGWGRLSRKLINGIR | |
| | DKQSGKTILDFLKSDGFANRNFMQLIHDDSLTFKEDIQKAQVSG | |
| | QGDSLHEHIANLAGSPAIKKGILQTVKVVDELVKVMGRHKPENI | |
| | VIXMARENQTTQKGQKNSRERMKRIEEGIKELGSQILKEHPVENT | |
| | QLQNEKLYLYYLQNGRDMYVDQELDINRLSDYDVDHIVPQSFL | |
| | KDDSIDNKVLTRSDKNRGKSDNVPSEEVVKKMKNYWRQLLNA | |
| | KLITQRKFDNLTKAERGGLSELDKAGFIKRQLVETRQITKHVAQI | |
| | LDSRMNTKYDENDKLIREVKVITLKSKLVSDFRKDFQFYKVREIN | |
| | NYHHAHDAYLNAVVGTALIKKYPKLESEFVYGDYKVYDVRKMI | |
| | AKSEQEIGKATAKYFFYSNIMNFFKTEITLANGEIRKRPLIETNGE | |
| | TGEIVWDKGRDFATVRKVLSMPQVNIVKKTEVQTGGFSKESILP | |
| | KRNSDKLIARKKDWDPKKYGGFDSPTVAYSVLVVAKVEKGKSK | |
| | KLKSVKELLGITIMERSSFEKNPIDFLEAKGYKEVKKDLIIKLPKY | |
| | SLFELENGRKRMLASAGELQKGNELALPSKYVNFLYLASHYEKL | |
| | KGSPEDNEQKQLFVEQHKHYLDEIIEQISEFSKRVILADANLDKV | |
| | LSAYNKHRDKPIREQAENIIHLFTLTNLGAPAAFKYFDTTIDRKR | |
| | YTSTKEVLDATLIHQSITGLYETRIDLSQLGGD | |
| Cas9 nickase | MDKKYSIGLDIGTNSVGWAVITDEYKVPSKKFKVLGNTDRHSIK | SEQ ID NO: 44 |
| Streptococcus | KNLIGALLFDSGETAEATRLKRTARRRYTRRKNRICYLQEIFSNE | |
| pyogenes | MAKVDDSFFHRLEESFLVEEDKKHERHPIFGNIVDEVAYHEKYP | |
| Q99ZW2 Cas9 | TIYHLRKKLVDSTDKADLRLIYLALAHMIKFRGHFLIEGDLNPDN | |
| with H983X, | SDVDKLFIQLVQTYNQLFEENPINASGVDAKAILSARLSKSRRLE | |
| wherein X is | NLIAQLPGEKKNGLFGNLIALSLGLTPNFKSNFDLAEDAKLQLSK | |
| any alternate | DTYDDDLDNLLAQIGDQYADLFLAAKNLSDAILLSDILRVNTEIT | |
| amino acid | KAPLSASMIKRYDEHHQDLTLLKALVRQQLPEKYKEIFFDQSKN | |
| | GYAGYIDGGASQEEFYKFIKPILEKMDGTEELLVKLNREDLLRKQ | |
| | RTFDNGSIPHQIHLGELHAILRRQEDFYPFLKDNREKIEKILTFRIP | |
| | YYVGPLARGNSRFAWMTRKSEETITPWNFEEVVDKGASAQSFIE | |
| | RMTNFDKNLPNEKVLPKHSLLYEYFTVYNELTKVKYVTEGMRK | |
| | PAFLSGEQKKAIVDLLFKTNRKVTVKQLKEDYFKKIECFDSVEIS | |
| | GVEDRFNASLGTYHDLLKIIKDKDFLDNEENEDILEDIVLTLTLFE | |
| | DREMIEERLKTYAHLFDDKVMKQLKRRRYTGWGRLSRKLINGIR | |
| | DKQSGKTILDFLKSDGFANRNFMQLIHDDSLTFKEDIQKAQVSG | |
| | QGDSLHEHIANLAGSPAIKKGILQTVKVVDELVKVMGRHKPENI | |
| | VIEMARENQTTQKGQKNSRERMKRIEEGIKELGSQILKEHPVENT | |
| | QLQNEKLYLYYLQNGRDMYVDQELDINRLSDYDVDHIVPQSFL | |
| | KDDSIDNKVLTRSDKNRGKSDNVPSEEVVKKMKNYWRQLLNA | |
| | KLITQRKFDNLTKAERGGLSELDKAGFIKRQLVETRQITKHVAQI | |
| | LDSRMNTKYDENDKLIREVKVITLKSKLVSDFRKDFQFYKVREIN | |
| | NYHXAHDAYLNAVVGTALIKKYPKLESEFVYGDYKVYDVRKMI | |
| | AKSEQEIGKATAKYFFYSNIMNFFKTEITLANGEIRKRPLIETNGE | |
| | TGEIVWDKGRDFATVRKVLSMPQVNIVKKTEVQTGGFSKESILP | |
| | KRNSDKLIARKKDWDPKKYGGFDSPTVAYSVLVVAKVEKGKSK | |
| | KLKSVKELLGITIMERSSFEKNPIDFLEAKGYKEVKKDLIIKLPKY | |
| | SLFELENGRKRMLASAGELQKGNELALPSKYVNFLYLASHYEKL | |
| | KGSPEDNEQKQLFVEQHKHYLDEIIEQISEFSKRVILADANLDKV | |
| | LSAYNKHRDKPIREQAENIIHLFTLTNLGAPAAFKYFDTTIDRKR | |
| | YTSTKEVLDATLIHQSITGLYETRIDLSQLGGD | |
| Cas9 nickase | MDKKYSIGLDIGTNSVGWAVITDEYKVPSKKFKVLGNTDRHSIK | SEQ ID NO: 45 |
| Streptococcus | KNLIGALLFDSGETAEATRLKRTARRRYTRRKNRICYLQEIFSNE | |
| pyogenes | MAKVDDSFFHRLEESFLVEEDKKHERHPIFGNIVDEVAYHEKYP | |
| Q99ZW2 Cas9 | TIYHLRKKLVDSTDKADLRLIYLALAHMIKFRGHFLIEGDLNPDN | |
| with D986X, | SDVDKLFIQLVQTYNQLFEENPINASGVDAKAILSARLSKSRRLE | |
| wherein X is | NLIAQLPGEKKNGLFGNLIALSLGLTPNFKSNFDLAEDAKLQLSK | |
| any alternate | DTYDDDLDNLLAQIGDQYADLFLAAKNLSDAILLSDILRVNTEIT | |
| amino acid | KAPLSASMIKRYDEHHQDLTLLKALVRQQLPEKYKEIFFDQSKN | |
| | GYAGYIDGGASQEEFYKFIKPILEKMDGTEELLVKLNREDLLRKQ | |
| | RTFDNGSIPHQIHLGELHAILRRQEDFYPFLKDNREKIEKILTFRIP | |
| | YYVGPLARGNSRFAWMTRKSEETITPWNFEEVVDKGASAQSFIE | |
| | RMTNFDKNLPNEKVLPKHSLLYEYFTVYNELTKVKYVTEGMRK | |
| | PAFLSGEQKKAIVDLLFKTNRKVTVKQLKEDYFKKIECFDSVEIS | |
| | GVEDRFNASLGTYHDLLKIIKDKDFLDNEENEDILEDIVLTLTLFE | |
| | DREMIEERLKTYAHLFDDKVMKQLKRRRYTGWGRLSRKLINGIR | |
| | DKQSGKTILDFLKSDGFANRNFMQLIHDDSLTFKEDIQKAQVSG | |
| | QGDSLHEHIANLAGSPAIKKGILQTVKVVDELVKVMGRHKPENI | |
| | VIEMARENQTTQKGQKNSRERMKRIEEGIKELGSQILKEHPVENT | |
| | QLQNEKLYLYYLQNGRDMYVDQELDINRLSDYDVDHIVPQSFL | |
| | KDDSIDNKVLTRSDKNRGKSDNVPSEEVVKKMKNYWRQLLNA | |
| | KLITQRKFDNLTKAERGGLSELDKAGFIKRQLVETRQITKHVAQI | |
| | LDSRMNTKYDENDKLIREVKVITLKSKLVSDFRKDFQFYKVREIN | |
| | NYHHAHXAYLNAVVGTALIKKYPKLESEFVYGDYKVYDVRKMI | |
| | AKSEQEIGKATAKYFFYSNIMNFFKTEITLANGEIRKRPLIETNGE | |
| | TGEIVWDKGRDFATVRKVLSMPQVNIVKKTEVQTGGFSKESILP | |
| | KRNSDKLIARKKDWDPKKYGGFDSPTVAYSVLVVAKVEKGKSK | |
| | KLKSVKELLGITIMERSSFEKNPIDFLEAKGYKEVKKDLIIKLPKY | |
| | SLFELENGRKRMLASAGELQKGNELALPSKYVNFLYLASHYEKL | |
| | KGSPEDNEQKQLFVEQHKHYLDEIIEQISEFSKRVILADANLDKV | |
| | LSAYNKHRDKPIREQAENIIHLFTLTNLGAPAAFKYFDTTIDRKR | |
| | YTSTKEVLDATLIHQSITGLYETRIDLSQLGGD | |
| Cas9 nickase | MDKKYSIGLAIGTNSVGWAVITDEYKVPSKKFKVLGNTDRHSIK | SEQ ID NO: 46 |
| Streptococcus | KNLIGALLFDSGETAEATRLKRTARRRYTRRKNRICYLQEIFSNE | |
| pyogenes | MAKVDDSFFHRLEESFLVEEDKKHERHPIFGNIVDEVAYHEKYP | |
| Q99ZW2 Cas9 | TIYHLRKKLVDSTDKADLRLIYLALAHMIKFRGHFLIEGDLNPDN | |
| with D10A | SDVDKLFIQLVQTYNQLFEENPINASGVDAKAILSARLSKSRRLE | |
| | NLIAQLPGEKKNGLFGNLIALSLGLTPNFKSNFDLAEDAKLQLSK | |
| | DTYDDDLDNLLAQIGDQYADLFLAAKNLSDAILLSDILRVNTEIT | |
| | KAPLSASMIKRYDEHHQDLTLLKALVRQQLPEKYKEIFFDQSKN | |
| | GYAGYIDGGASQEEFYKFIKPILEKMDGTEELLVKLNREDLLRKQ | |
| | RTFDNGSIPHQIHLGELHAILRRQEDFYPFLKDNREKIEKILTFRIP | |
| | YYVGPLARGNSRFAWMTRKSEETITPWNFEEVVDKGASAQSFIE | |
| | RMTNFDKNLPNEKVLPKHSLLYEYFTVYNELTKVKYVTEGMRK | |
| | PAFLSGEQKKAIVDLLFKTNRKVTVKQLKEDYFKKIECFDSVEIS | |
| | GVEDRFNASLGTYHDLLKIIKDKDFLDNEENEDILEDIVLTLTLFE | |
| | DREMIEERLKTYAHLFDDKVMKQLKRRRYTGWGRLSRKLINGIR | |
| | DKQSGKTILDFLKSDGFANRNFMQLIHDDSLTFKEDIQKAQVSG | |
| | QGDSLHEHIANLAGSPAIKKGILQTVKVVDELVKVMGRHKPENI | |
| | VIEMARENQTTQKGQKNSRERMKRIEEGIKELGSQILKEHPVENT | |
| | QLQNEKLYLYYLQNGRDMYVDQELDINRLSDYDVDHIVPQSFL | |
| | KDDSIDNKVLTRSDKNRGKSDNVPSEEVVKKMKNYWRQLLNA | |
| | KLITQRKFDNLTKAERGGLSELDKAGFIKRQLVETRQITKHVAQI | |
| | LDSRMNTKYDENDKLIREVKVITLKSKLVSDFRKDFQFYKVREIN | |
| | NYHHAHDAYLNAVVGTALIKKYPKLESEFVYGDYKVYDVRKMI | |
| | AKSEQEIGKATAKYFFYSNIMNFFKTEITLANGEIRKRPLIETNGE | |
| | TGEIVWDKGRDFATVRKVLSMPQVNIVKKTEVQTGGFSKESILP | |
| | KRNSDKLIARKKDWDPKKYGGFDSPTVAYSVLVVAKVEKGKSK | |
| | KLKSVKELLGITIMERSSFEKNPIDFLEAKGYKEVKKDLIIKLPKY | |
| | SLFELENGRKRMLASAGELQKGNELALPSKYVNFLYLASHYEKL | |
| | KGSPEDNEQKQLFVEQHKHYLDEIIEQISEFSKRVILADANLDKV | |
| | LSAYNKHRDKPIREQAENIIHLFTLTNLGAPAAFKYFDTTIDRKR | |
| | YTSTKEVLDATLIHQSITGLYETRIDLSQLGGD | |
| Cas9 nickase | MDKKYSIGLDIGTNSVGWAVITDEYKVPSKKFKVLGNTDRHSIK | SEQ ID NO: 47 |
| Streptococcus | KNLIGALLFDSGETAEATRLKRTARRRYTRRKNRICYLQEIFSNE | |
| pyogenes | MAKVDDSFFHRLEESFLVEEDKKHERHPIFGNIVDEVAYHEKYP | |
| Q99ZW2 Cas9 | TIYHLRKKLVDSTDKADLRLIYLALAHMIKFRGHFLIEGDLNPDN | |
| with E762A | SDVDKLFIQLVQTYNQLFEENPINASGVDAKAILSARLSKSRRLE | |
| | NLIAQLPGEKKNGLFGNLIALSLGLTPNFKSNFDLAEDAKLQLSK | |
| | DTYDDDLDNLLAQIGDQYADLFLAAKNLSDAILLSDILRVNTEIT | |
| | KAPLSASMIKRYDEHHQDLTLLKALVRQQLPEKYKEIFFDQSKN | |
| | GYAGYIDGGASQEEFYKFIKPILEKMDGTEELLVKLNREDLLRKQ | |
| | RTFDNGSIPHQIHLGELHAILRRQEDFYPFLKDNREKIEKILTFRIP | |
| | YYVGPLARGNSRFAWMTRKSEETITPWNFEEVVDKGASAQSFIE | |
| | RMTNFDKNLPNEKVLPKHSLLYEYFTVYNELTKVKYVTEGMRK | |
| | PAFLSGEQKKAIVDLLFKTNRKVTVKQLKEDYFKKIECFDSVEIS | |
| | GVEDRFNASLGTYHDLLKIIKDKDFLDNEENEDILEDIVLTLTLFE | |
| | DREMIEERLKTYAHLFDDKVMKQLKRRRYTGWGRLSRKLINGIR | |
| | DKQSGKTILDFLKSDGFANRNFMQLIHDDSLTFKEDIQKAQVSG | |
| | QGDSLHEHIANLAGSPAIKKGILQTVKVVDELVKVMGRHKPENI | |
| | VIAMARENQTTQKGQKNSRERMKRIEEGIKELGSQILKEHPVENT | |
| | QLQNEKLYLYYLQNGRDMYVDQELDINRLSDYDVDHIVPQSFL | |
| | KDDSIDNKVLTRSDKNRGKSDNVPSEEVVKKMKNYWRQLLNA | |
| | KLITQRKFDNLTKAERGGLSELDKAGFIKRQLVETRQITKHVAQI | |
| | LDSRMNTKYDENDKLIREVKVITLKSKLVSDFRKDFQFYKVREIN | |
| | NYHHAHDAYLNAVVGTALIKKYPKLESEFVYGDYKVYDVRKMI | |
| | AKSEQEIGKATAKYFFYSNIMNFFKTEITLANGEIRKRPLIETNGE | |
| | TGEIVWDKGRDFATVRKVLSMPQVNIVKKTEVQTGGFSKESILP | |
| | KRNSDKLIARKKDWDPKKYGGFDSPTVAYSVLVVAKVEKGKSK | |
| | KLKSVKELLGITIMERSSFEKNPIDFLEAKGYKEVKKDLIIKLPKY | |
| | SLFELENGRKRMLASAGELQKGNELALPSKYVNFLYLASHYEKL | |
| | KGSPEDNEQKQLFVEQHKHYLDEIIEQISEFSKRVILADANLDKV | |
| | LSAYNKHRDKPIREQAENIIHLFTLTNLGAPAAFKYFDTTIDRKR | |
| | YTSTKEVLDATLIHQSITGLYETRIDLSQLGGD | |
| Cas9 nickase | MDKKYSIGLDIGTNSVGWAVITDEYKVPSKKFKVLGNTDRHSIK | SEQ ID NO: 48 |
| Streptococcus | KNLIGALLFDSGETAEATRLKRTARRRYTRRKNRICYLQEIFSNE | |
| pyogenes | MAKVDDSFFHRLEESFLVEEDKKHERHPIFGNIVDEVAYHEKYP | |
| Q99ZW2 Cas9 | TIYHLRKKLVDSTDKADLRLIYLALAHMIKFRGHFLIEGDLNPDN | |
| with H983A | SDVDKLFIQLVQTYNQLFEENPINASGVDAKAILSARLSKSRRLE | |
| | NLIAQLPGEKKNGLFGNLIALSLGLTPNFKSNFDLAEDAKLQLSK | |
| | DTYDDDLDNLLAQIGDQYADLFLAAKNLSDAILLSDILRVNTEIT | |
| | KAPLSASMIKRYDEHHQDLTLLKALVRQQLPEKYKEIFFDQSKN | |
| | GYAGYIDGGASQEEFYKFIKPILEKMDGTEELLVKLNREDLLRKQ | |
| | RTFDNGSIPHQIHLGELHAILRRQEDFYPFLKDNREKIEKILTFRIP | |
| | YYVGPLARGNSRFAWMTRKSEETITPWNFEEVVDKGASAQSFIE | |
| | RMTNFDKNLPNEKVLPKHSLLYEYFTVYNELTKVKYVTEGMRK | |
| | PAFLSGEQKKAIVDLLFKTNRKVTVKQLKEDYFKKIECFDSVEIS | |
| | GVEDRFNASLGTYHDLLKIIKDKDFLDNEENEDILEDIVLTLTLFE | |
| | DREMIEERLKTYAHLFDDKVMKQLKRRRYTGWGRLSRKLINGIR | |
| | DKQSGKTILDFLKSDGFANRNFMQLIHDDSLTFKEDIQKAQVSG | |
| | QGDSLHEHIANLAGSPAIKKGILQTVKVVDELVKVMGRHKPENI | |
| | VIEMARENQTTQKGQKNSRERMKRIEEGIKELGSQILKEHPVENT | |
| | QLQNEKLYLYYLQNGRDMYVDQELDINRLSDYDVDHIVPQSFL | |
| | KDDSIDNKVLTRSDKNRGKSDNVPSEEVVKKMKNYWRQLLNA | |
| | KLITQRKFDNLTKAERGGLSELDKAGFIKRQLVETRQITKHVAQI | |
| | LDSRMNTKYDENDKLIREVKVITLKSKLVSDFRKDFQFYKVREIN | |
| | NYHAAHDAYLNAVVGTALIKKYPKLESEFVYGDYKVYDVRKMI | |
| | AKSEQEIGKATAKYFFYSNIMNFFKTEITLANGEIRKRPLIETNGE | |
| | TGEIVWDKGRDFATVRKVLSMPQVNIVKKTEVQTGGFSKESILP | |
| | KRNSDKLIARKKDWDPKKYGGFDSPTVAYSVLVVAKVEKGKSK | |
| | KLKSVKELLGITIMERSSFEKNPIDFLEAKGYKEVKKDLIIKLPKY | |
| | SLFELENGRKRMLASAGELQKGNELALPSKYVNFLYLASHYEKL | |
| | KGSPEDNEQKQLFVEQHKHYLDEIIEQISEFSKRVILADANLDKV | |
| | LSAYNKHRDKPIREQAENIIHLFTLTNLGAPAAFKYFDTTIDRKR | |
| | YTSTKEVLDATLIHQSITGLYETRIDLSQLGGD | |
| Cas9 nickase | MDKKYSIGLDIGTNSVGWAVITDEYKVPSKKFKVLGNTDRHSIK | SEQ ID NO: 49 |
| Streptococcus | KNLIGALLFDSGETAEATRLKRTARRRYTRRKNRICYLQEIFSNE | |
| pyogenes | MAKVDDSFFHRLEESFLVEEDKKHERHPIFGNIVDEVAYHEKYP | |
| Q99ZW2 Cas9 | TIYHLRKKLVDSTDKADLRLIYLALAHMIKFRGHFLIEGDLNPDN | |
| with D986A | SDVDKLFIQLVQTYNQLFEENPINASGVDAKAILSARLSKSRRLE | |
| | NLIAQLPGEKKNGLFGNLIALSLGLTPNFKSNFDLAEDAKLQLSK | |
| | DTYDDDLDNLLAQIGDQYADLFLAAKNLSDAILLSDILRVNTEIT | |
| | KAPLSASMIKRYDEHHQDLTLLKALVRQQLPEKYKEIFFDQSKN | |
| | GYAGYIDGGASQEEFYKFIKPILEKMDGTEELLVKLNREDLLRKQ | |
| | RTFDNGSIPHQIHLGELHAILRRQEDFYPFLKDNREKIEKILTFRIP | |
| | YYVGPLARGNSRFAWMTRKSEETITPWNFEEVVDKGASAQSFIE | |
| | RMTNFDKNLPNEKVLPKHSLLYEYFTVYNELTKVKYVTEGMRK | |
| | PAFLSGEQKKAIVDLLFKTNRKVTVKQLKEDYFKKIECFDSVEIS | |
| | GVEDRFNASLGTYHDLLKIIKDKDFLDNEENEDILEDIVLTLTLFE | |
| | DREMIEERLKTYAHLFDDKVMKQLKRRRYTGWGRLSRKLINGIR | |
| | DKQSGKTILDFLKSDGFANRNFMQLIHDDSLTFKEDIQKAQVSG | |
| | QGDSLHEHIANLAGSPAIKKGILQTVKVVDELVKVMGRHKPENI | |
| | VIEMARENQTTQKGQKNSRERMKRIEEGIKELGSQILKEHPVENT | |
| | QLQNEKLYLYYLQNGRDMYVDQELDINRLSDYDVDHIVPQSFL | |
| | KDDSIDNKVLTRSDKNRGKSDNVPSEEVVKKMKNYWRQLLNA | |
| | KLITQRKFDNLTKAERGGLSELDKAGFIKRQLVETRQITKHVAQI | |
| | LDSRMNTKYDENDKLIREVKVITLKSKLVSDFRKDFQFYKVREIN | |
| | NYHHAHAAYLNAVVGTALIKKYPKLESEFVYGDYKVYDVRKMI | |
| | AKSEQEIGKATAKYFFYSNIMNFFKTEITLANGEIRKRPLIETNGE | |
| | TGEIVWDKGRDFATVRKVLSMPQVNIVKKTEVQTGGFSKESILP | |
| | KRNSDKLIARKKDWDPKKYGGFDSPTVAYSVLVVAKVEKGKSK | |
| | KLKSVKELLGITIMERSSFEKNPIDFLEAKGYKEVKKDLIIKLPKY | |
| | SLFELENGRKRMLASAGELQKGNELALPSKYVNFLYLASHYEKL | |
| | KGSPEDNEQKQLFVEQHKHYLDEIIEQISEFSKRVILADANLDKV | |
| | LSAYNKHRDKPIREQAENIIHLFTLTNLGAPAAFKYFDTTIDRKR | |
| | YTSTKEVLDATLIHQSITGLYETRIDLSQLGGD | |

[0388] In another embodiment, the Cas9 nickase comprises a mutation in the HNH domain which inactivates the HNH nuclease activity. For example, mutations in histidine (H) 840 or asparagine (R) 863 have been reported as loss-of-function mutations of the HNH nuclease domain and the creation of a functional Cas9 nickase (e.g., Nishimasu et al., “Crystal structure of Cas9 in complex with guide RNA and target DNA,” Cell 156(5), 935-949, which is incorporated herein by reference). Thus, nickase mutations in the HNH domain could include H840X and R863X, wherein X is any amino acid other than the wild type amino acid. In certain embodiments, the nickase could be H840A or R863A or a combination thereof.

[0389] In various embodiments, the Cas9 nickase can have a mutation in the HNH nuclease domain and have one of the following amino acid sequences, or a variant thereof having an amino acid sequence that has at least 80%, at least 85%, at least 90%, at least 95%, or at least 99% sequence identity thereto.

| Description | Sequence | SEQ ID NO: |
|---|---|---|
| Cas9 nickase | MDKKYSIGLDIGTNSVGWAVITDEYKVPSKKFKVLGNTDRHSIK | SEQ ID NO: 50 |
| Streptococcus | KNLIGALLFDSGETAEATRLKRTARRRYTRRKNRICYLQEIFSNE | |
| pyogenes | MAKVDDSFFHRLEESFLVEEDKKHERHPIFGNIVDEVAYHEKYP | |
| Q99ZW2 Cas9 | TIYHLRKKLVDSTDKADLRLIYLALAHMIKFRGHFLIEGDLNPDN | |
| with H840X, | SDVDKLFIQLVQTYNQLFEENPINASGVDAKAILSARLSKSRRLE | |
| wherein X is | NLIAQLPGEKKNGLFGNLIALSLGLTPNFKSNFDLAEDAKLQLSK | |
| any alternate | DTYDDDLDNLLAQIGDQYADLFLAAKNLSDAILLSDILRVNTEIT | |
| amino acid | KAPLSASMIKRYDEHHQDLTLLKALVRQQLPEKYKEIFFDQSKN | |
| | GYAGYIDGGASQEEFYKFIKPILEKMDGTEELLVKLNREDLLRKQ | |
| | RTFDNGSIPHQIHLGELHAILRRQEDFYPFLKDNREKIEKILTFRIP | |
| | YYVGPLARGNSRFAWMTRKSEETITPWNFEEVVDKGASAQSFIE | |
| | RMTNFDKNLPNEKVLPKHSLLYEYFTVYNELTKVKYVTEGMRK | |
| | PAFLSGEQKKAIVDLLFKTNRKVTVKQLKEDYFKKIECFDSVEIS | |
| | GVEDRFNASLGTYHDLLKIIKDKDFLDNEENEDILEDIVLTLTLFE | |
| | DREMIEERLKTYAHLFDDKVMKQLKRRRYTGWGRLSRKLINGIR | |
| | DKQSGKTILDFLKSDGFANRNFMQLIHDDSLTFKEDIQKAQVSG | |
| | QGDSLHEHIANLAGSPAIKKGILQTVKVVDELVKVMGRHKPENI | |
| | VIEMARENQTTQKGQKNSRERMKRIEEGIKELGSQILKEHPVENT | |
| | QLQNEKLYLYYLQNGRDMYVDQELDINRLSDYDVDXIVPQSFL | |
| | KDDSIDNKVLTRSDKNRGKSDNVPSEEVVKKMKNYWRQLLNA | |
| | KLITQRKFDNLTKAERGGLSELDKAGFIKRQLVETRQITKHVAQI | |
| | LDSRMNTKYDENDKLIREVKVITLKSKLVSDFRKDFQFYKVREIN | |
| | NYHHAHDAYLNAVVGTALIKKYPKLESEFVYGDYKVYDVRKMI | |
| | AKSEQEIGKATAKYFFYSNIMNFFKTEITLANGEIRKRPLIETNGE | |
| | TGEIVWDKGRDFATVRKVLSMPQVNIVKKTEVQTGGFSKESILP | |
| | KRNSDKLIARKKDWDPKKYGGFDSPTVAYSVLVVAKVEKGKSK | |
| | KLKSVKELLGITIMERSSFEKNPIDFLEAKGYKEVKKDLIIKLPKY | |
| | SLFELENGRKRMLASAGELQKGNELALPSKYVNFLYLASHYEKL | |
| | KGSPEDNEQKQLFVEQHKHYLDEIIEQISEFSKRVILADANLDKV | |
| | LSAYNKHRDKPIREQAENIIHLFTLTNLGAPAAFKYFDTTIDRKR | |
| | YTSTKEVLDATLIHQSITGLYETRIDLSQLGGD | |
| Cas9 nickase | MDKKYSIGLDIGTNSVGWAVITDEYKVPSKKFKVLGNTDRHSIK | SEQ ID NO: 51 |
| Streptococcus | KNLIGALLFDSGETAEATRLKRTARRRYTRRKNRICYLQEIFSNE | |
| pyogenes | MAKVDDSFFHRLEESFLVEEDKKHERHPIFGNIVDEVAYHEKYP | |
| Q99ZW2 Cas9 | TIYHLRKKLVDSTDKADLRLIYLALAHMIKFRGHFLIEGDLNPDN | |
| with H840A | SDVDKLFIQLVQTYNQLFEENPINASGVDAKAILSARLSKSRRLE | |
| | NLIAQLPGEKKNGLFGNLIALSLGLTPNFKSNFDLAEDAKLQLSK | |
| | DTYDDDLDNLLAQIGDQYADLFLAAKNLSDAILLSDILRVNTEIT | |
| | KAPLSASMIKRYDEHHQDLTLLKALVRQQLPEKYKEIFFDQSKN | |
| | GYAGYIDGGASQEEFYKFIKPILEKMDGTEELLVKLNREDLLRKQ | |
| | RTFDNGSIPHQIHLGELHAILRRQEDFYPFLKDNREKIEKILTFRIP | |
| | YYVGPLARGNSRFAWMTRKSEETITPWNFEEVVDKGASAQSFIE | |
| | RMTNFDKNLPNEKVLPKHSLLYEYFTVYNELTKVKYVTEGMRK | |
| | PAFLSGEQKKAIVDLLFKTNRKVTVKQLKEDYFKKIECFDSVEIS | |
| | GVEDRFNASLGTYHDLLKIIKDKDFLDNEENEDILEDIVLTLTLFE | |
| | DREMIEERLKTYAHLFDDKVMKQLKRRRYTGWGRLSRKLINGIR | |
| | DKQSGKTILDFLKSDGFANRNFMQLIHDDSLTFKEDIQKAQVSG | |
| | QGDSLHEHIANLAGSPAIKKGILQTVKVVDELVKVMGRHKPENI | |
| | VIEMARENQTTQKGQKNSRERMKRIEEGIKELGSQILKEHPVENT | |
| | QLQNEKLYLYYLQNGRDMYVDQELDINRLSDYDVDAIVPQSFL | |
| | KDDSIDNKVLTRSDKNRGKSDNVPSEEVVKKMKNYWRQLLNA | |
| | KLITQRKFDNLTKAERGGLSELDKAGFIKRQLVETRQITKHVAQI | |
| | LDSRMNTKYDENDKLIREVKVITLKSKLVSDFRKDFQFYKVREIN | |
| | NYHHAHDAYLNAVVGTALIKKYPKLESEFVYGDYKVYDVRKMI | |
| | AKSEQEIGKATAKYFFYSNIMNFFKTEITLANGEIRKRPLIETNGE | |
| | TGEIVWDKGRDFATVRKVLSMPQVNIVKKTEVQTGGFSKESILP | |
| | KRNSDKLIARKKDWDPKKYGGFDSPTVAYSVLVVAKVEKGKSK | |
| | KLKSVKELLGITIMERSSFEKNPIDFLEAKGYKEVKKDLIIKLPKY | |
| | SLFELENGRKRMLASAGELQKGNELALPSKYVNFLYLASHYEKL | |
| | KGSPEDNEQKQLFVEQHKHYLDEIIEQISEFSKRVILADANLDKV | |
| | LSAYNKHRDKPIREQAENIIHLFTLTNLGAPAAFKYFDTTIDRKR | |
| | YTSTKEVLDATLIHQSITGLYETRIDLSQLGGD | |
| Cas9 nickase | MDKKYSIGLDIGTNSVGWAVITDEYKVPSKKFKVLGNTDRHSIK | SEQ ID NO: 52 |
| Streptococcus | KNLIGALLFDSGETAEATRLKRTARRRYTRRKNRICYLQEIFSNE | |
| pyogenes | MAKVDDSFFHRLEESFLVEEDKKHERHPIFGNIVDEVAYHEKYP | |
| Q99ZW2 Cas9 | TIYHLRKKLVDSTDKADLRLIYLALAHMIKFRGHFLIEGDLNPDN | |
| with R863X, | SDVDKLFIQLVQTYNQLFEENPINASGVDAKAILSARLSKSRRLE | |
| wherein X is | NLIAQLPGEKKNGLFGNLIALSLGLTPNFKSNFDLAEDAKLQLSK | |
| any alternate | DTYDDDLDNLLAQIGDQYADLFLAAKNLSDAILLSDILRVNTEIT | |
| amino acid | KAPLSASMIKRYDEHHQDLTLLKALVRQQLPEKYKEIFFDQSKN | |
| | GYAGYIDGGASQEEFYKFIKPILEKMDGTEELLVKLNREDLLRKQ | |
| | RTFDNGSIPHQIHLGELHAILRRQEDFYPFLKDNREKIEKILTFRIP | |
| | YYVGPLARGNSRFAWMTRKSEETITPWNFEEVVDKGASAQSFIE | |
| | RMTNFDKNLPNEKVLPKHSLLYEYFTVYNELTKVKYVTEGMRK | |
| | PAFLSGEQKKAIVDLLFKTNRKVTVKQLKEDYFKKIECFDSVEIS | |
| | GVEDRFNASLGTYHDLLKIIKDKDFLDNEENEDILEDIVLTLTLFE | |
| | DREMIEERLKTYAHLFDDKVMKQLKRRRYTGWGRLSRKLINGIR | |
| | DKQSGKTILDFLKSDGFANRNFMQLIHDDSLTFKEDIQKAQVSG | |
| | QGDSLHEHIANLAGSPAIKKGILQTVKVVDELVKVMGRHKPENI | |
| | VIEMARENQTTQKGQKNSRERMKRIEEGIKELGSQILKEHPVENT | |
| | QLQNEKLYLYYLQNGRDMYVDQELDINRLSDYDVDHIVPQSFL | |
| | KDDSIDNKVLTRSDKNXGKSDNVPSEEVVKKMKNYWRQLLNA | |
| | KLITQRKFDNLTKAERGGLSELDKAGFIKRQLVETRQITKHVAQI | |
| | LDSRMNTKYDENDKLIREVKVITLKSKLVSDFRKDFQFYKVREIN | |
| | NYHHAHDAYLNAVVGTALIKKYPKLESEFVYGDYKVYDVRKMI | |
| | AKSEQEIGKATAKYFFYSNIMNFFKTEITLANGEIRKRPLIETNGE | |
| | TGEIVWDKGRDFATVRKVLSMPQVNIVKKTEVQTGGFSKESILP | |
| | KRNSDKLIARKKDWDPKKYGGFDSPTVAYSVLVVAKVEKGKSK | |
| | KLKSVKELLGITIMERSSFEKNPIDFLEAKGYKEVKKDLIIKLPKY | |
| | SLFELENGRKRMLASAGELQKGNELALPSKYVNFLYLASHYEKL | |
| | KGSPEDNEQKQLFVEQHKHYLDEIIEQISEFSKRVILADANLDKV | |
| | LSAYNKHRDKPIREQAENIIHLFTLTNLGAPAAFKYFDTTIDRKR | |
| | YTSTKEVLDATLIHQSITGLYETRIDLSQLGGD | |
| Cas9 nickase | MDKKYSIGLDIGTNSVGWAVITDEYKVPSKKFKVLGNTDRHSIK | SEQ ID NO: 53 |
| Streptococcus | KNLIGALLFDSGETAEATRLKRTARRRYTRRKNRICYLQEIFSNE | |
| pyogenes | MAKVDDSFFHRLEESFLVEEDKKHERHPIFGNIVDEVAYHEKYP | |
| Q99ZW2 Cas9 | TIYHLRKKLVDSTDKADLRLIYLALAHMIKFRGHFLIEGDLNPDN | |
| with R863A | SDVDKLFIQLVQTYNQLFEENPINASGVDAKAILSARLSKSRRLE | |
| | NLIAQLPGEKKNGLFGNLIALSLGLTPNFKSNFDLAEDAKLQLSK | |
| | DTYDDDLDNLLAQIGDQYADLFLAAKNLSDAILLSDILRVNTEIT | |
| | KAPLSASMIKRYDEHHQDLTLLKALVRQQLPEKYKEIFFDQSKN | |
| | GYAGYIDGGASQEEFYKFIKPILEKMDGTEELLVKLNREDLLRKQ | |
| | RTFDNGSIPHQIHLGELHAILRRQEDFYPFLKDNREKIEKILTFRIP | |
| | YYVGPLARGNSRFAWMTRKSEETITPWNFEEVVDKGASAQSFIE | |
| | RMTNFDKNLPNEKVLPKHSLLYEYFTVYNELTKVKYVTEGMRK | |
| | PAFLSGEQKKAIVDLLFKTNRKVTVKQLKEDYFKKIECFDSVEIS | |
| | GVEDRFNASLGTYHDLLKIIKDKDFLDNEENEDILEDIVLTLTLFE | |
| | DREMIEERLKTYAHLFDDKVMKQLKRRRYTGWGRLSRKLINGIR | |
| | DKQSGKTILDFLKSDGFANRNFMQLIHDDSLTFKEDIQKAQVSG | |
| | QGDSLHEHIANLAGSPAIKKGILQTVKVVDELVKVMGRHKPENI | |
| | VIEMARENQTTQKGQKNSRERMKRIEEGIKELGSQILKEHPVENT | |
| | QLQNEKLYLYYLQNGRDMYVDQELDINRLSDYDVDHIVPQSFL | |
| | KDDSIDNKVLTRSDKNAGKSDNVPSEEVVKKMKNYWRQLLNA | |
| | KLITQRKFDNLTKAERGGLSELDKAGFIKRQLVETRQITKHVAQI | |
| | LDSRMNTKYDENDKLIREVKVITLKSKLVSDFRKDFQFYKVREIN | |
| | NYHHAHDAYLNAVVGTALIKKYPKLESEFVYGDYKVYDVRKMI | |
| | AKSEQEIGKATAKYFFYSNIMNFFKTEITLANGEIRKRPLIETNGE | |
| | TGEIVWDKGRDFATVRKVLSMPQVNIVKKTEVQTGGFSKESILP | |
| | KRNSDKLIARKKDWDPKKYGGFDSPTVAYSVLVVAKVEKGKSK | |
| | KLKSVKELLGITIMERSSFEKNPIDFLEAKGYKEVKKDLIIKLPKY | |
| | SLFELENGRKRMLASAGELQKGNELALPSKYVNFLYLASHYEKL | |
| | KGSPEDNEQKQLFVEQHKHYLDEIIEQISEFSKRVILADANLDKV | |
| | LSAYNKHRDKPIREQAENIIHLFTLTNLGAPAAFKYFDTTIDRKR | |
| | YTSTKEVLDATLIHQSITGLYETRIDLSQLGGD | |

[0390] In some embodiments, the N-terminal methionine is removed from a Cas9 nickase, or from any Cas9 variant, ortholog, or equivalent disclosed or contemplated herein. For example, methionine-minus Cas9 nickases include the following sequences, or a variant thereof having an amino acid sequence that has at least 80%, at least 85%, at least 90%, at least 95%, or at least 99% sequence identity thereto.

| Description | Sequence |
|---|---|
| Cas9 nickase | DKKYSIGLDIGTNSVGWAVITDEYKVPSKKFKVLGNTDRHSIKKNLIGALLFDSG |
| (Met minus) | ETAEATRLKRTARRRYTRRKNRICYLQEIFSNEMAKVDDSFFHRLEESFLVEEDK |
| Streptococcus | KHERHPIFGNIVDEVAYHEKYPTIYHLRKKLVDSTDKADLRLIYLALAHMIKFRG |
| pyogenes | HFLIEGDLNPDNSDVDKLFIQLVQTYNQLFEENPINASGVDAKAILSARLSKSRRL |
| Q99ZW2 Cas9 | ENLIAQLPGEKKNGLFGNLIALSLGLTPNFKSNFDLAEDAKLQLSKDTYDDDLDN |
| with H840X, | LLAQIGDQYADLFLAAKNLSDAILLSDILRVNTEITKAPLSASMIKRYDEHHQDL |
| wherein X is | TLLKALVRQQLPEKYKEIFFDQSKNGYAGYIDGGASQEEFYKFIKPILEKMDGTE |
| any alternate | ELLVKLNREDLLRKQRTFDNGSIPHQIHLGELHAILRRQEDFYPFLKDNREKIEKI |
| amino acid | LTFRIPYYVGPLARGNSRFAWMTRKSEETITPWNFEEVVDKGASAQSFIERMTNF |
| | DKNLPNEKVLPKHSLLYEYFTVYNELTKVKYVTEGMRKPAFLSGEQKKAIVDLL |
| | FKTNRKVTVKQLKEDYFKKIECFDSVEISGVEDRFNASLGTYHDLLKIIKDKDFL |
| | DNEENEDILEDIVLTLTLFEDREMIEERLKTYAHLFDDKVMKQLKRRRYTGWGR |
| | LSRKLINGIRDKQSGKTILDFLKSDGFANRNFMQLIHDDSLTFKEDIQKAQVSGQ |
| | GDSLHEHIANLAGSPAIKKGILQTVKVVDELVKVMGRHKPENIVIEMARENQTT |
| | QKGQKNSRERMKRIEEGIKELGSQILKEHPVENTQLQNEKLYLYYLQNGRDMY |
| | VDQELDINRLSDYDVDXIVPQSFLKDDSIDNKVLTRSDKNRGKSDNVPSEEVVK |
| | KMKNYWRQLLNAKLITQRKFDNLTKAERGGLSELDKAGFIKRQLVETRQITKH |
| | VAQILDSRMNTKYDENDKLIREVKVITLKSKLVSDFRKDFQFYKVREINNYHHA |
| | HDAYLNAVVGTALIKKYPKLESEFVYGDYKVYDVRKMIAKSEQEIGKATAKYF |
| | FYSNIMNFFKTEITLANGEIRKRPLIETNGETGEIVWDKGRDFATVRKVLSMPQV |
| | NIVKKTEVQTGGFSKESILPKRNSDKLIARKKDWDPKKYGGFDSPTVAYSVLVV |
| | AKVEKGKSKKLKSVKELLGITIMERSSFEKNPIDFLEAKGYKEVKKDLIIKLPKYS |
| | LFELENGRKRMLASAGELQKGNELALPSKYVNFLYLASHYEKLKGSPEDNEQK |
| | QLFVEQHKHYLDEIIEQISEFSKRVILADANLDKVLSAYNKHRDKPIREQAENIIH |
| | LFTLTNLGAPAAFKYFDTTIDRKRYTSTKEVLDATLIHQSITGLYETRIDLSQLGG |
| | D (SEQ ID NO: 54) |
| Cas9 nickase | DKKYSIGLDIGTNSVGWAVITDEYKVPSKKFKVLGNTDRHSIKKNLIGALLFDSG |
| (Met minus) | ETAEATRLKRTARRRYTRRKNRICYLQEIFSNEMAKVDDSFFHRLEESFLVEEDK |
| Streptococcus | KHERHPIFGNIVDEVAYHEKYPTIYHLRKKLVDSTDKADLRLIYLALAHMIKFRG |
| pyogenes | HFLIEGDLNPDNSDVDKLFIQLVQTYNQLFEENPINASGVDAKAILSARLSKSRRL |
| Q99ZW2 Cas9 | ENLIAQLPGEKKNGLFGNLIALSLGLTPNFKSNFDLAEDAKLQLSKDTYDDDLDN |
| with H840A | LLAQIGDQYADLFLAAKNLSDAILLSDILRVNTEITKAPLSASMIKRYDEHHQDL |
| | TLLKALVRQQLPEKYKEIFFDQSKNGYAGYIDGGASQEEFYKFIKPILEKMDGTE |
| | ELLVKLNREDLLRKQRTFDNGSIPHQIHLGELHAILRRQEDFYPFLKDNREKIEKI |
| | LTFRIPYYVGPLARGNSRFAWMTRKSEETITPWNFEEVVDKGASAQSFIERMTNF |
| | DKNLPNEKVLPKHSLLYEYFTVYNELTKVKYVTEGMRKPAFLSGEQKKAIVDLL |
| | FKTNRKVTVKQLKEDYFKKIECFDSVEISGVEDRFNASLGTYHDLLKIIKDKDFL |
| | DNEENEDILEDIVLTLTLFEDREMIEERLKTYAHLFDDKVMKQLKRRRYTGWGR |
| | LSRKLINGIRDKQSGKTILDFLKSDGFANRNFMQLIHDDSLTFKEDIQKAQVSGQ |
| | GDSLHEHIANLAGSPAIKKGILQTVKVVDELVKVMGRHKPENIVIEMARENQTT |
| | QKGQKNSRERMKRIEEGIKELGSQILKEHPVENTQLQNEKLYLYYLQNGRDMY |
| | VDQELDINRLSDYDVDAIVPQSFLKDDSIDNKVLTRSDKNRGKSDNVPSEEVVK |
| | KMKNYWRQLLNAKLITQRKFDNLTKAERGGLSELDKAGFIKRQLVETRQITKH |
| | VAQILDSRMNTKYDENDKLIREVKVITLKSKLVSDFRKDFQFYKVREINNYHHA |
| | HDAYLNAVVGTALIKKYPKLESEFVYGDYKVYDVRKMIAKSEQEIGKATAKYF |
| | FYSNIMNFFKTEITLANGEIRKRPLIETNGETGEIVWDKGRDFATVRKVLSMPQV |
| | NIVKKTEVQTGGFSKESILPKRNSDKLIARKKDWDPKKYGGFDSPTVAYSVLVV |
| | AKVEKGKSKKLKSVKELLGITIMERSSFEKNPIDFLEAKGYKEVKKDLIIKLPKYS |
| | LFELENGRKRMLASAGELQKGNELALPSKYVNFLYLASHYEKLKGSPEDNEQK |
| | QLFVEQHKHYLDEIIEQISEFSKRVILADANLDKVLSAYNKHRDKPIREQAENIIH |
| | LFTLTNLGAPAAFKYFDTTIDRKRYTSTKEVLDATLIHQSITGLYETRIDLSQLGG |
| | D (SEQ ID NO: 55) |
| Cas9 nickase | DKKYSIGLDIGTNSVGWAVITDEYKVPSKKFKVLGNTDRHSIKKNLIGALLFDSG |
| (Met minus) | ETAEATRLKRTARRRYTRRKNRICYLQEIFSNEMAKVDDSFFHRLEESFLVEEDK |
| Streptococcus | KHERHPIFGNIVDEVAYHEKYPTIYHLRKKLVDSTDKADLRLIYLALAHMIKFRG |
| pyogenes | HFLIEGDLNPDNSDVDKLFIQLVQTYNQLFEENPINASGVDAKAILSARLSKSRRL |
| Q99ZW2 Cas9 | ENLIAQLPGEKKNGLFGNLIALSLGLTPNFKSNFDLAEDAKLQLSKDTYDDDLDN |
| with R863X, | LLAQIGDQYADLFLAAKNLSDAILLSDILRVNTEITKAPLSASMIKRYDEHHQDL |
| wherein X is | TLLKALVRQQLPEKYKEIFFDQSKNGYAGYIDGGASQEEFYKFIKPILEKMDGTE |
| any alternate | ELLVKLNREDLLRKQRTFDNGSIPHQIHLGELHAILRRQEDFYPFLKDNREKIEKI |
| amino acid | LTFRIPYYVGPLARGNSRFAWMTRKSEETITPWNFEEVVDKGASAQSFIERMTNF |
| | DKNLPNEKVLPKHSLLYEYFTVYNELTKVKYVTEGMRKPAFLSGEQKKAIVDLL |
| | FKTNRKVTVKQLKEDYFKKIECFDSVEISGVEDRFNASLGTYHDLLKIIKDKDFL |
| | DNEENEDILEDIVLTLTLFEDREMIEERLKTYAHLFDDKVMKQLKRRRYTGWGR |
| | LSRKLINGIRDKQSGKTILDFLKSDGFANRNFMQLIHDDSLTFKEDIQKAQVSGQ |
| | GDSLHEHIANLAGSPAIKKGILQTVKVVDELVKVMGRHKPENIVIEMARENQTT |
| | QKGQKNSRERMKRIEEGIKELGSQILKEHPVENTQLQNEKLYLYYLQNGRDMY |
| | VDQELDINRLSDYDVDHIVPQSFLKDDSIDNKVLTRSDKNXGKSDNVPSEEVVK |
| | KMKNYWRQLLNAKLITQRKFDNLTKAERGGLSELDKAGFIKRQLVETRQITKH |
| | VAQILDSRMNTKYDENDKLIREVKVITLKSKLVSDFRKDFQFYKVREINNYHHA |
| | HDAYLNAVVGTALIKKYPKLESEFVYGDYKVYDVRKMIAKSEQEIGKATAKYF |
| | FYSNIMNFFKTEITLANGEIRKRPLIETNGETGEIVWDKGRDFATVRKVLSMPQV |
| | NIVKKTEVQTGGFSKESILPKRNSDKLIARKKDWDPKKYGGFDSPTVAYSVLVV |
| | AKVEKGKSKKLKSVKELLGITIMERSSFEKNPIDFLEAKGYKEVKKDLIIKLPKYS |
| | LFELENGRKRMLASAGELQKGNELALPSKYVNFLYLASHYEKLKGSPEDNEQK |
| | QLFVEQHKHYLDEIIEQISEFSKRVILADANLDKVLSAYNKHRDKPIREQAENIIH |
| | LFTLTNLGAPAAFKYFDTTIDRKRYTSTKEVLDATLIHQSITGLYETRIDLSQLGG |
| | D (SEQ ID NO: 56) |
| Cas9 nickase | DKKYSIGLDIGTNSVGWAVITDEYKVPSKKFKVLGNTDRHSIKKNLIGALLFDSG |
| (Met minus) | ETAEATRLKRTARRRYTRRKNRICYLQEIFSNEMAKVDDSFFHRLEESFLVEEDK |
| Streptococcus | KHERHPIFGNIVDEVAYHEKYPTIYHLRKKLVDSTDKADLRLIYLALAHMIKFRG |
| pyogenes | HFLIEGDLNPDNSDVDKLFIQLVQTYNQLFEENPINASGVDAKAILSARLSKSRRL |
| Q99ZW2 Cas9 | ENLIAQLPGEKKNGLFGNLIALSLGLTPNFKSNFDLAEDAKLQLSKDTYDDDLDN |
| with R863A | LLAQIGDQYADLFLAAKNLSDAILLSDILRVNTEITKAPLSASMIKRYDEHHQDL |
| | TLLKALVRQQLPEKYKEIFFDQSKNGYAGYIDGGASQEEFYKFIKPILEKMDGTE |
| | ELLVKLNREDLLRKQRTFDNGSIPHQIHLGELHAILRRQEDFYPFLKDNREKIEKI |
| | LTFRIPYYVGPLARGNSRFAWMTRKSEETITPWNFEEVVDKGASAQSFIERMTNF |
| | DKNLPNEKVLPKHSLLYEYFTVYNELTKVKYVTEGMRKPAFLSGEQKKAIVDLL |
| | FKTNRKVTVKQLKEDYFKKIECFDSVEISGVEDRFNASLGTYHDLLKIIKDKDFL |
| | DNEENEDILEDIVLTLTLFEDREMIEERLKTYAHLFDDKVMKQLKRRRYTGWGR |
| | LSRKLINGIRDKQSGKTILDFLKSDGFANRNFMQLIHDDSLTFKEDIQKAQVSGQ |
| | GDSLHEHIANLAGSPAIKKGILQTVKVVDELVKVMGRHKPENIVIEMARENQTT |
| | QKGQKNSRERMKRIEEGIKELGSQILKEHPVENTQLQNEKLYLYYLQNGRDMY |
| | VDQELDINRLSDYDVDHIVPQSFLKDDSIDNKVLTRSDKNAGKSDNVPSEEVVK |
| | KMKNYWRQLLNAKLITQRKFDNLTKAERGGLSELDKAGFIKRQLVETRQITKH |
| | VAQILDSRMNTKYDENDKLIREVKVITLKSKLVSDFRKDFQFYKVREINNYHHA |
| | HDAYLNAVVGTALIKKYPKLESEFVYGDYKVYDVRKMIAKSEQEIGKATAKYF |
| | FYSNIMNFFKTEITLANGEIRKRPLIETNGETGEIVWDKGRDFATVRKVLSMPQV |
| | NIVKKTEVQTGGFSKESILPKRNSDKLIARKKDWDPKKYGGFDSPTVAYSVLVV |
| | AKVEKGKSKKLKSVKELLGITIMERSSFEKNPIDFLEAKGYKEVKKDLIIKLPKYS |
| | LFELENGRKRMLASAGELQKGNELALPSKYVNFLYLASHYEKLKGSPEDNEQK |
| | QLFVEQHKHYLDEIIEQISEFSKRVILADANLDKVLSAYNKHRDKPIREQAENIIH |
| | LFTLTNLGAPAAFKYFDTTIDRKRYTSTKEVLDATLIHQSITGLYETRIDLSQLGG |
| | D (SEQ ID NO: 57) |

[0391] E. Other Cas9 Variants

[0392] Besides dead Cas9 and Cas9 nickase variants, the Cas9 proteins used herein may also include other “Cas9 variants” having at least about 70% identical, at least about 80% identical, at least about 90% identical, at least about 95% identical, at least about 96% identical, at least about 97% identical, at least about 98% identical, at least about 99% identical, at least about 99.5% identical, or at least about 99.9% identical to any reference Cas9 protein, including any wild type Cas9, or mutant Cas9 (e.g., a dead Cas9 or Cas9 nickase), or fragment Cas9, or circular permutant Cas9, or other variant of Cas9 disclosed herein or known in the art. In some embodiments, a Cas9 variant may have 1, 2, 3, 4, 5, 6, 7, 8, 9, 10, 11, 12, 13, 14, 15, 16, 17, 18, 19, 20, 21, 22, 21, 24, 25, 26, 27, 28, 29, 30, 31, 32, 33, 34, 35, 36, 37, 38, 39, 40, 41, 42, 43, 44, 45, 46, 47, 48, 49, 50 or more amino acid changes compared to a reference Cas9. In some embodiments, the Cas9 variant comprises a fragment of a reference Cas9 (e.g., a gRNA binding domain or a DNA-cleavage domain), such that the fragment is at least about 70% identical, at least about 80% identical, at least about 90% identical, at least about 95% identical, at least about 96% identical, at least about 97% identical, at least about 98% identical, at least about 99% identical, at least about 99.5% identical, or at least about 99.9% identical to the corresponding fragment of wild type Cas9. In some embodiments, the fragment is at least 30%, at least 35%, at least 40%, at least 45%, at least 50%, at least 55%, at least 60%, at least 65%, at least 70%, at least 75%, at least 80%, at least 85%, at least 90%, at least 95% identical, at least 96%, at least 97%, at least 98%, at least 99%, or at least 99.5% of the amino acid length of a corresponding wild type Cas9 (e.g., SEQ ID NO: 18).

[0393] In some embodiments, the disclosure also may utilize Cas9 fragments that retain their functionality and that are fragments of any herein disclosed Cas9 protein. In some embodiments, the Cas9 fragment is at least 100 amino acids in length. In some embodiments, the fragment is at least 100, 150, 200, 250, 300, 350, 400, 450, 500, 550, 600, 650, 700, 750, 800, 850, 900, 950, 1000, 1050, 1100, 1150, 1200, 1250, or at least 1300 amino acids in length.

[0394] In various embodiments, the multi-flap prime editors disclosed herein may comprise one of the Cas9 variants described as follows, or a Cas9 variant thereof having at least about 70% identical, at least about 80% identical, at least about 90% identical, at least about 95% identical, at least about 96% identical, at least about 97% identical, at least about 98% identical, at least about 99% identical, at least about 99.5% identical, or at least about 99.9% identical to any reference Cas9 variants.

[0395] F. Small-Sized Cas9 Variants

[0396] In some embodiments, the multi-flap prime editors contemplated herein can include a Cas9 protein that is of smaller molecular weight than the canonical SpCas9 sequence. In some embodiments, the smaller-sized Cas9 variants may facilitate delivery to cells, e.g., by an expression vector, nanoparticle, or other means of delivery. In certain embodiments, the smaller-sized Cas9 variants can include enzymes categorized as type II enzymes of the Class 2 CRISPR-Cas systems. In some embodiments, the smaller-sized Cas9 variants can include enzymes categorized as type V enzymes of the Class 2 CRISPR-Cas systems. In other embodiments, the smaller-sized Cas9 variants can include enzymes categorized as type VI enzymes of the Class 2 CRISPR-Cas systems.

[0397] The canonical SpCas9 protein is 1368 amino acids in length and has a predicted molecular weight of 158 kilodaltons. The term “small-sized Cas9 variant”, as used herein, refers to any Cas9 variant—naturally occurring, engineered, or otherwise—that is less than at least 1300 amino acids, or at least less than 1290 amino acids, or than less than 1280 amino acids, or less than 1270 amino acid, or less than 1260 amino acid, or less than 1250 amino acids, or less than 1240 amino acids, or less than 1230 amino acids, or less than 1220 amino acids, or less than 1210 amino acids, or less than 1200 amino acids, or less than 1190 amino acids, or less than 1180 amino acids, or less than 1170 amino acids, or less than 1160 amino acids, or less than 1150 amino acids, or less than 1140 amino acids, or less than 1130 amino acids, or less than 1120 amino acids, or less than 1110 amino acids, or less than 1100 amino acids, or less than 1050 amino acids, or less than 1000 amino acids, or less than 950 amino acids, or less than 900 amino acids, or less than 850 amino acids, or less than 800 amino acids, or less than 750 amino acids, or less than 700 amino acids, or less than 650 amino acids, or less than 600 amino acids, or less than 550 amino acids, or less than 500 amino acids, but at least larger than about 400 amino acids and retaining the required functions of the Cas9 protein. The Cas9 variants can include those categorized as type II, type V, or type VI enzymes of the Class 2 CRISPR-Cas system.

[0398] In various embodiments, the multi-flap prime editors disclosed herein may comprise one of the small-sized Cas9 variants described as follows, or a Cas9 variant thereof having at least about 70% identical, at least about 80% identical, at least about 90% identical, at least about 95% identical, at least about 96% identical, at least about 97% identical, at least about 98% identical, at least about 99% identical, at least about 99.5% identical, or at least about 99.9% identical to any reference small-sized

[0399] Cas9 protein.

| Description | Sequence | SEQ ID NO: |
|---|---|---|
| SaCas9 | MGKRNYILGLDIGITSVGYGIIDYETRDVIDAGVRLFKEANVENN | SEQ ID NO: 58 |
| Staphylococcus | EGRRSKRGARRLKRRRRHRIQRVKKLLFDYNLLTDHSELSGINPY | |
| aureus | EARVKGLSQKLSEEEFSAALLHLAKRRGVHNVNEVEEDTGNELS | |
| 1053 AA | TKEQISRNSKALEEKYVAELQLERLKKDGEVRGSINRFKTSDYV | |
| 123 kDa | KEAKQLLKVQKAYHQLDQSFIDTYIDLLETRRTYYEGPGEGSPFG | |
| | WKDIKEWYEMLMGHCTYFPEELRSVKYAYNADLYNALNDLNN | |
| | LVITRDENEKLEYYEKFQIIENVFKQKKKPTLKQIAKEILVNEEDI | |
| | KGYRVTSTGKPEFTNLKVYHDIKDITARKEIIENAELLDQIAKILTI | |
| | YQSSEDIQEELTNLNSELTQEEIEQISNLKGYTGTHNLSLKAINLIL | |
| | DELWHTNDNQIAIFNRLKLVPKKVDLSQQKEIPTTLVDDFILSPV | |
| | VKRSFIQSIKVINAIIKKYGLPNDIIIELAREKNSKDAQKMINEMQK | |
| | RNRQTNERIEEIIRTTGKENAKYLIEKIKLHDMQEGKCLYSLEAIP | |
| | LEDLLNNPFNYEVDHIIPRSVSFDNSFNNKVLVKQEENSKKGNRT | |
| | PFQYLSSSDSKISYETFKKHILNLAKGKGRISKTKKEYLLEERDIN | |
| | RFSVQKDFINRNLVDTRYATRGLMNLLRSYFRVNNLDVKVKSIN | |
| | GGFTSFLRRKWKFKKERNKGYKHHAEDALIIANADFIFKEWKKL | |
| | DKAKKVMENQMFEEKQAESMPEIETEQEYKEIFITPHQIKHIKDF | |
| | KDYKYSHRVDKKPNRKLINDTLYSTRKDDKGNTLIVNNLNGLY | |
| | DKDNDKLKKLINKSPEKLLMYHHDPQTYQKLKLIMEQYGDEKN | |
| | PLYKYYEETGNYLTKYSKKDNGPVIKKIKYYGNKLNAHLDITDD | |
| | YPNSRNKVVKLSLKPYRFDVYLDNGVYKFVTVKNLDVIKKENY | |
| | YEVNSKCYEEAKKLKKISNQAEFIASFYKNDLIKINGELYRVIGV | |
| | NNDLLNRIEVNMIDITYREYLENMNDKRPPHIIKTIASKTQSIKKY | |
| | STDILGNLYEVKSKKHPQIIKK | |
| NmeCas9 | MAAFKPNSINYILGLDIGIASVGWAMVEIDEEENPIRLIDLGVRVF | SEQ ID NO: 59 |
| N. meningitidis | ERAEVPKTGDSLAMARRLARSVRRLTRRRAHRLLRTRRLLKREG | |
| 1083 AA | VLQAANFDENGLIKSLPNTPWQLRAAALDRKLTPLEWSAVLLHL | |
| 124.5 kDa | IKHRGYLSQRKNEGETADKELGALLKGVAGNAHALQTGDFRTP | |
| | AELALNKFEKESGHIRNQRSDYSHTFSRKDLQAELILLFEKQKEF | |
| | GNPHVSGGLKEGIETLLMTQRPALSGDAVQKMLGHCTFEPAEPK | |
| | AAKNTYTAERFIWLTKLNNLRILEQGSERPLTDTERATLMDEPYR | |
| | KSKLTYAQARKLLGLEDTAFFKGLRYGKDNAEASTLMEMKAYH | |
| | AISRALEKEGLKDKKSPLNLSPELQDEIGTAFSLFKTDEDITGRLK | |
| | DRIQPEILEALLKHISFDKFVQISLKALRRIVPLMEQGKRYDEACA | |
| | EIYGDHYGKKNTEEKIYLPPIPADEIRNPVVLRALSQARKVINGV | |
| | VRRYGSPARIHIETAREVGKSFKDRKEIEKRQEENRKDREKAAA | |
| | KFREYFPNFVGEPKSKDILKLRLYEQQHGKCLYSGKEINLGRLNE | |
| | KGYVEIDAALPFSRTWDDSFNNKVLVLGSENQNKGNQTPYEYF | |
| | NGKDNSREWQEFKARVETSRFPRSKKQRILLQKFDEDGFKERNL | |
| | NDTRYVNRFLCQFVADRMRLTGKGKKRVFASNGQITNLLRGFW | |
| | GLRKVRAENDRHHALDAVVVACSTVAMQQKITRFVRYKEMNA | |
| | FDGKTIDKETGEVLHQKTHFPQPWEFFAQEVMIRVFGKPDGKPE | |
| | FEEADTLEKLRTLLAEKLSSRPEAVHEYVTPLFVSRAPNRKMSGQ | |
| | GHMETVKSAKRLDEGVSVLRVPLTQLKLKDLEKMVNREREPKL | |
| | YEALKARLEAHKDDPAKAFAEPFYKYDKAGNRTQQVKAVRVE | |
| | QVQKTGVWVRNHNGIADNATMVRVDVFEKGDKYYLVPIYSWQ | |
| | VAKGILPDRAVVQGKDEEDWQLIDDSFNFKFSLHPNDLVEVITK | |
| | KARMFGYFASCHRGTGNINIRIHDLDHKIGKNGILEGIGVKTALS | |
| | FQKYQIDELGKEIRPCRLKKRPPVR | |
| CjCas9 | MARILAFDIGISSIGWAFSENDELKDCGVRIFTKVENPKTGESLAL | SEQ ID NO: 60 |
| C. jejuni | PRRLARSARKRLARRKARLNHLKHLIANEFKLNYEDYQSFDESL | |
| 984 AA | AKAYKGSLISPYELRFRALNELLSKQDFARVILHIAKRRGYDDIK | |
| 114.9 kDa | NSDDKEKGAILKAIKQNEEKLANYQSVGEYLYKEYFQKFKENSK | |
| | EFTNVRNKKESYERCIAQSFLKDELKLIFKKQREFGFSFSKKFEEE | |
| | VLSVAFYKRALKDFSHLVGNCSFFTDEKRAPKNSPLAFMFVALT | |
| | RIINLLNNLKNTEGILYTKDDLNALLNEVLKNGTLTYKQTKKLLG | |
| | LSDDYEFKGEKGTYFIEFKKYKEFIKALGEHNLSQDDLNEIAKDI | |
| | TLIKDEIKLKKALAKYDLNQNQIDSLSKLEFKDHLNISFKALKLV | |
| | TPLMLEGKKYDEACNELNLKVAINEDKKDFLPAFNETYYKDEVT | |
| | NPVVLRAIKEYRKVLNALLKKYGKVHKINIELAREVGKNHSQRA | |
| | KIEKEQNENYKAKKDAELECEKLGLKINSKNILKLRLFKEQKEFC | |
| | AYSGEKIKISDLQDEKMLEIDHIYPYSRSFDDSYMNKVLVFTKQN | |
| | QEKLNQTPFEAFGNDSAKWQKIEVLAKNLPTKKQKRILDKNYK | |
| | DKEQKNFKDRNLNDTRYIARLVLNYTKDYLDFLPLSDDENTKLN | |
| | DTQKGSKVHVEAKSGMLTSALRHTWGFSAKDRNNHLHHAIDA | |
| | VIIAYANNSIVKAFSDFKKEQESNSAELYAKKISELDYKNKRKFF | |
| | EPFSGFRQKVLDKIDEIFVSKPERKKPSGALHEETFRKEEEFYQSY | |
| | GGKEGVLKALELGKIRKVNGKIVKNGDMFRVDIFKHKKTNKFY | |
| | AVPIYTMDFALKVLPNKAVARSKKGEIKDWILMDENYEFCFSLY | |
| | KDSLILIQTKDMQEPEFVYYNAFTSSTVSLIVSKHDNKFETLSKN | |
| | QKILFKNANEKEVIAKSIGIQNLKVFEKYIVSALGEVTKAEFRQRE | |
| | DFKK | |
| GeoCas9 | MRYKIGLDIGITSVGWAVMNLDIPRIEDLGVRIFDRAENPQTGES | SEQ ID NO: 61 |
| G. | LALPRRLARSARRRLRRRKHRLERIRRLVIREGILTKEELDKLFEE | |
| stearo- | KHEIDVWQLRVEALDRKLNNDELARVLLHLAKRRGFKSNRKSE | |
| thermophilus | RSNKENSTMLKHIEENRAILSSYRTVGEMIVKDPKFALHKRNKG | |
| 1087 AA | ENYTNTIARDDLEREIRLIFSKQREFGNMSCTEEFENEYITIWASQ | |
| 127 kDa | RPVASKDDIEKKVGFCTFEPKEKRAPKATYTFQSFIAWEHINKLR | |
| | LISPSGARGLTDEERRLLYEQAFQKNKITYHDIRTLLHLPDDTYFK | |
| | GIVYDRGESRKQNENIRFLELDAYHQIRKAVDKVYGKGKSSSFLP | |
| | IDFDTFGYALTLFKDDADIHSYLRNEYEQNGKRMPNLANKVYD | |
| | NELIEELLNLSFTKFGHLSLKALRSILPYMEQGEVYSSACERAGY | |
| | TFTGPKKKQKTMLLPNIPPIANPVVMRALTQARKVVNAIIKKYGS | |
| | PVSIHIELARDLSQTFDERRKTKKEQDENRKKNETAIRQLMEYGL | |
| | TLNPTGHDIVKFKLWSEQNGRCAYSLQPIEIERLLEPGYVEVDHV | |
| | IPYSRSLDDSYTNKVLVLTRENREKGNRIPAEYLGVGTERWQQF | |
| | ETFVLTNKQFSKKKRDRLLRLHYDENEETEFKNRNLNDTRYISRF | |
| | FANFIREHLKFAESDDKQKVYTVNGRVTAHLRSRWEFNKNREES | |
| | DLHHAVDAVIVACTTPSDIAKVTAFYQRREQNKELAKKTEPHFP | |
| | QPWPHFADELRARLSKHPKESIKALNLGNYDDQKLESLQPVFVS | |
| | RMPKRSVTGAAHQETLRRYVGIDERSGKIQTVVKTKLSEIKLDAS | |
| | GHFPMYGKESDPRTYEAIRQRLLEHNNDPKKAFQEPLYKPKKNG | |
| | EPGPVIRTVKIIDTKNQVIPLNDGKTVAYNSNIVRVDVFEKDGKY | |
| | YCVPVYTMDIMKGILPNKAIEPNKPYSEWKEMTEDYTFRFSLYP | |
| | NDLIRIELPREKTVKTAAGEEINVKDVFVYYKTIDSANGGLELISH | |
| | DHRFSLRGVGSRTLKRFEKYQVDVLGNIYKVRGEKRVGLASSAH | |
| | SKPGKTIRPLQSTRD | |
| LbaCas12a | MSKLEKFTNCYSLSKTLRFKAIPVGKTQENIDNKRLLVEDEKRAE | SEQ ID NO: 62 |
| L. bacterium | DYKGVKKLLDRYYLSFINDVLHSIKLKNLNNYISLFRKKTRTEKE | |
| 1228 AA | NKELENLEINLRKEIAKAFKGNEGYKSLFKKDIIETILPEFLDDKD | |
| 143.9 kDa | EIALVNSFNGFTTAFTGFFDNRENMFSEEAKSTSIAFRCINENLTR | |
| | YISNMDIFEKVDAIFDKHEVQEIKEKILNSDYDVEDFFEGEFFNFV | |
| | LTQEGIDVYNAIIGGFVTESGEKIKGLNEYINLYNQKTKQKLPKF | |
| | KPLYKQVLSDRESLSFYGEGYTSDEEVLEVFRNTLNKNSEIFSSIK | |
| | KLEKLFKNFDEYSSAGIFVKNGPAISTISKDIFGEWNVIRDKWNA | |
| | EYDDIHLKKKAVVTEKYEDDRRKSFKKIGSFSLEQLQEYADADL | |
| | SVVEKLKEIIIQKVDEIYKVYGSSEKLFDADFVLEKSLKKNDAVV | |
| | AIMKDLLDSVKSFENYIKAFFGEGKETNRDESFYGDFVLAYDILL | |
| | KVDHIYDAIRNYVTQKPYSKDKFKLYFQNPQFMGGWDKDKETD | |
| | YRATILRYGSKYYLAIMDKKYAKCLQKIDKDDVNGNYEKINYK | |
| | LLPGPNKMLPKVFFSKKWMAYYNPSEDIQKIYKNGTFKKGDMF | |
| | NLNDCHKLIDFFKDSISRYPKWSNAYDFNFSETEKYKDIAGFYRE | |
| | VEEQGYKVSFESASKKEVDKLVEEGKLYMFQIYNKDFSDKSHGT | |
| | PNLHTMYFKLLFDENNHGQIRLSGGAELFMRRASLKKEELVVHP | |
| | ANSPIANKNPDNPKKTTTLSYDVYKDKRFSEDQYELHIPIAINKCP | |
| | KNIFKINTEVRVLLKHDDNPYVIGIDRGERNLLYIVVVDGKGNIV | |
| | EQYSLNEIINNFNGIRIKTDYHSLLDKKEKERFEARQNWTSIENIK | |
| | ELKAGYISQVVHKICELVEKYDAVIALEDLNSGFKNSRVKVEKQ | |
| | VYQKFEKMLIDKLNYMVDKKSNPCATGGALKGYQITNKFESFK | |
| | SMSTQNGFIFYIPAWLTSKIDPSTGFVNLLKTKYTSIADSKKFISSF | |
| | DRIMYVPEEDLFEFALDYKNFSRTDADYIKKWKLYSYGNRIRIFR | |
| | NPKKNNVFDWEEVCLTSAYKELFNKYGINYQQGDIRALLCEQSD | |
| | KAFYSSFMALMSLMLQMRNSITGRTDVDFLISPVKNSDGIFYDSR | |
| | NYEAQENAILPKNADANGAYNIARKVLWAIGQFKKAEDEKLDK | |
| | VKIAISNKEWLEYAQTSVKH | |
| BhCas12b | MATRSFILKIEPNEEVKKGLWKTHEVLNHGIAYYMNILKLIRQEA | SEQ ID NO: 63 |
| B. hisashii | IYEHHEQDPKNPKKVSKAEIQAELWDFVLKMQKCNSFTHEVDK | |
| 1108 AA | DEVFNILRELYEELVPSSVEKKGEANQLSNKFLYPLVDPNSQSGK | |
| 130.4 kDa | GTASSGRKPRWYNLKIAGDPSWEEEKKKWEEDKKKDPLAKILG | |
| | KLAEYGLIPLFIPYTDSNEPIVKEIKWMEKSRNQSVRRLDKDMFI | |
| | QALERFLSWESWNLKVKEEYEKVEKEYKTLEERIKEDIQALKAL | |
| | EQYEKERQEQLLRDTLNTNEYRLSKRGLRGWREIIQKWLKMDE | |
| | NEPSEKYLEVFKDYQRKHPREAGDYSVYEFLSKKENHFIWRNHP | |
| | EYPYLYATFCEIDKKKKDAKQQATFTLADPINHPLWVRFEERSG | |
| | SNLNKYRILTEQLHTEKLKKKLTVQLDRLIYPTESGGWEEKGKV | |
| | DIVLLPSRQFYNQIFLDIEEKGKHAFTYKDESIKFPLKGTLGGARV | |
| | QFDRDHLRRYPHKVESGNVGRIYFNMTVNIEPTESPVSKSLKIHR | |
| | DDFPKVVNFKPKELTEWIKDSKGKKLKSGIESLEIGLRVMSIDLG | |
| | QRQAAAASIFEVVDQKPDIEGKLFFPIKGTELYAVHRASFNIKLPG | |
| | ETLVKSREVLRKAREDNLKLMNQKLNFLRNVLHFQQFEDITERE | |
| | KRVTKWISRQENSDVPLVYQDELIQIRELMYKPYKDWVAFLKQL | |
| | HKRLEVEIGKEVKHWRKSLSDGRKGLYGISLKNIDEIDRTRKFLL | |
| | RWSLRPTEPGEVRRLEPGQRFAIDQLNHLNALKEDRLKKMANTII | |
| | MHALGYCYDVRKKKWQAKNPACQIILFEDLSNYNPYEERSRFE | |
| | NSKLMKWSRREIPRQVALQGEIYGLQVGEVGAQFSSRFHAKTGS | |
| | PGIRCSVVTKEKLQDNRFFKNLQREGRLTLDKIAVLKEGDLYPD | |
| | KGGEKFISLSKDRKCVTTHADINAAQNLQKRFWTRTHGFYKVY | |
| | CKAYQVDGQTVYIPESKDQKQKIIEEFGEGYFILKDGVYEWVNA | |
| | GKLKIKKGSSKQSSSELVDSDILKDSFDLASELKGEKLMLYRDPS | |
| | GNVFPSDKWMAAGVFFGKLERILISKLTNQYSISTIEDDSSKQSM | |

[0400] G. Cas9 Equivalents

[0401] In some embodiments, the multi-flap prime editors described herein can include any Cas9 equivalent. As used herein, the term “Cas9 equivalent” is a broad term that encompasses any napDNAbp protein that serves the same function as Cas9 in the present multi-flap prime editors despite that its amino acid primary sequence and/or its three-dimensional structure may be different and/or unrelated from an evolutionary standpoint. Thus, while Cas9 equivalents include any Cas9 ortholog, homolog, mutant, or variant described or embraced herein that are evolutionarily related, the Cas9 equivalents also embrace proteins that may have evolved through convergent evolution processes to have the same or similar function as Cas9, but that do not necessarily have any similarity with regard to amino acid sequence and/or three-dimensional structure. The multi-flapprime editors described here embrace any Cas9 equivalent that would provide the same or similar function as Cas9 despite that the Cas9 equivalent may be based on a protein that arose through convergent evolution. For instance, if Cas9 refers to a type II enzyme of the CRISPR-Cas system, a Cas9 equivalent can refer to a type V or type VI enzyme of the CRISPR-Cas system.

[0402] For example, Cas12e (CasX) is a Cas9 equivalent that reportedly has the same function as Cas9 but which evolved through convergent evolution. Thus, the Cas12e (CasX) protein described in Liu et al., “CasX enzymes comprises a distinct family of RNA-guided genome editors,” Nature, 2019, Vol.566: 218-223, is contemplated to be used with the multi-flap prime editors described herein. In addition, any variant or modification of Cas12e (CasX) is conceivable and within the scope of the present disclosure.

[0403] Cas9 is a bacterial enzyme that evolved in a wide variety of species. However, the Cas9 equivalents contemplated herein may also be obtained from archaea, which constitute a domain and kingdom of single-celled prokaryotic microbes different from bacteria.

[0404] In some embodiments, Cas9 equivalents may refer to Cas12e (CasX) or Cas12d (CasY), which have been described in, for example, Burstein et al., “New CRISPR—Cas systems from uncultivated microbes.” Cell Res. 2017 Feb 21. doi: 10.1038/cr.2017.21, the entire contents of which is hereby incorporated by reference. Using genome-resolved metagenomics, a number of CRISPR—Cas systems were identified, including the first reported Cas9 in the archaeal domain of life. This divergent Cas9 protein was found in little-studied nanoarchaea as part of an active CRISPR—Cas system. In bacteria, two previously unknown systems were discovered, CRISPR-Cas12e and CRISPR-Cas12d, which are among the most compact systems yet discovered. In some embodiments, Cas9 refers to Cas12e, or a variant of Cas12e. In some embodiments, Cas9 refers to a Cas12d, or a variant of Cas12d. It should be appreciated that other RNA-guided DNA binding proteins may be used as a nucleic acid programmable DNA binding protein (napDNAbp) and are within the scope of this disclosure. Also see Liu et al., “CasX enzymes comprises a distinct family of RNA-guided genome editors,” Nature, 2019, Vol.566: 218-223. Any of these Cas9 equivalents are contemplated.

[0405] In some embodiments, the Cas9 equivalent comprises an amino acid sequence that is at least 85%, at least 90%, at least 91%, at least 92%, at least 93%, at least 94%, at least 95%, at least 96%, at least 97%, at least 98%, at least 99%, or at least 99.5% identical to a naturally-occurring Cas12e (CasX) or Cas12d (CasY) protein. In some embodiments, the napDNAbp is a naturally-occurring Cas12e (CasX) or Cas12d (CasY) protein. In some embodiments, the napDNAbp comprises an amino acid sequence that is at least 85%, at least 90%, at least 91%, at least 92%, at least 93%, at least 94%, at least 95%, at least 96%, at least 97%, at least 98%, at least 99%, or at least 99.5% identical to a wild-type Cas moiety or any Cas moiety provided herein.

[0406] In various embodiments, the nucleic acid programmable DNA binding proteins include, without limitation, Cas9 (e.g., dCas9 and nCas9), Cas12e (CasX), Cas12d (CasY), Cas12a (Cpf1), Cas12b1 (C2c1), Cas13a (C2c2), Cas12c (C2c3), Argonaute, and Cas12b1. One example of a nucleic acid programmable DNA-binding protein that has different PAM specificity than Cas9 is Clustered Regularly Interspaced Short Palindromic Repeats from Prevotella and Francisella 1 (i.e, Cas12a (Cpf1)). Similar to Cas9, Cas12a (Cpf1) is also a Class 2 CRISPR effector, but it is a member of type V subgroup of enzymes, rather than the type II subgroup. It has been shown that Cas12a (Cpf1) mediates robust DNA interference with features distinct from Cas9. Cas12a (Cpf1) is a single RNA-guided endonuclease lacking tracrRNA, and it utilizes a T-rich protospacer-adjacent motif (TTN, TTTN, or YTN). Moreover, Cpf1 cleaves DNA via a staggered DNA double-stranded break. Out of 16 Cpf1-family proteins, two enzymes from Acidaminococcus and Lachnospiraceae are shown to have efficient genome-editing activity in human cells. Cpf1 proteins are known in the art and have been described previously, for example Yamano et al., “Crystal structure of Cpf1 in complex with guide RNA and target DNA.” Cell (165) 2016, p. 949-962; the entire contents of which is hereby incorporated by reference.

[0407] In still other embodiments, the Cas protein may include any CRISPR associated protein, including but not limited to, Cas12a, Cas12b1, Cas1, Cas1B, Cas2, Cas3, Cas4, Cas5, Cas6, Cas7, Cas8, Cas9 (also known as Csnl and Csx12), Cas10, Csy1, Csy2, Csy3, Cse1, Cse2, Csc1, Csc2, Csa5, Csn2, Csm2, Csm3, Csm4, Csm5, Csm6, Cmr1, Cmr3, Cmr4, Cmr5, Cmr6, Csb1, Csb2, Csb3, Csx17, Csx14, Csx10, Csx16, CsaX, Csx3, Csx1, Csx15, Csf1, Csf2, Csf3, Csf4, homologs thereof, or modified versions thereof, and preferably comprising a nickase mutation (e.g., a mutation corresponding to the DlOA mutation of the wild type Cas9 polypeptide of SEQ ID NO: 18).

[0408] In various other embodiments, the napDNAbp can be any of the following proteins: a Cas9, a Cas12a (Cpf1), a Cas12e (CasX), a Cas12d (CasY), a Cas12b1 (C2c1), a Cas13a (C2c2), a Cas12c (C2c3), a GeoCas9, a CjCas9, a Cas12g, a Cas12h, a Cas12i, a Cas13b, a Cas13c, a Cas13d, a Cas14, a Csn2, an xCas9, an SpCas9-NG, a circularly permuted Cas9, or an Argonaute (Ago) domain, or a variant thereof.

[0409] Exemplary Cas9 equivalent protein sequences can include the following:

| Description | Sequence |
|---|---|
| AsCas12a | MTQFEGFTNLYQVSKTLRFELIPQGKTLKHIQEQGFIEEDKARNDHYKELKPIIDRI |
| (previously | YKTYADQCLQLVQLDWENLSAAIDSYRKEKTEETRNALIEEQATYRNAIHDYFIGR |
| known as Cpf1) | TDNLTDAINKRHAEIYKGLFKAELFNGKVLKQLGTVTTTEHENALLRSFDKFTTYF |
| Acidaminococcus | SGFYENRKNVFSAEDISTAIPHRIVQDNFPKFKENCHIFTRLITAVPSLREHFENVKK |
| sp. | AIGIFVSTSIEEVFSFPFYNQLLTQTQIDLYNQLLGGISREAGTEKIKGLNEVLNLAIQ |
| (strain | KNDETAHIIASLPHRFIPLFKQILSDRNTLSFILEEFKSDEEVIQSFCKYKTLLRNENV |
| BV3L6) | LETAEALFNELNSIDLTHIFISHKKLETISSALCDHWDTLRNALYERRISELTGKITKS |
| UniProtKB | AKEKVQRSLKHEDINLQEIISAAGKELSEAFKQKTSEILSHAHAALDQPLPTTLKKQ |
| U2UMQ6 | EEKEILKSQLDSLLGLYHLLDWFAVDESNEVDPEFSARLTGIKLEMEPSLSFYNKA |
| | RNYATKKPYSVEKFKLNFQMPTLASGWDVNKEKNNGAILFVKNGLYYLGIMPKQ |
| | KGRYKALSFEPTEKTSEGFDKMYYDYFPDAAKMIPKCSTQLKAVTAHFQTHTTPIL |
| | LSNNFIEPLEITKEIYDLNNPEKEPKKFQTAYAKKTGDQKGYREALCKWIDFTRDFL |
| | SKYTKTTSIDLSSLRPSSQYKDLGEYYAELNPLLYHISFQRIAEKEIMDAVETGKLY |
| | LFQIYNKDFAKGHHGKPNLHTLYWTGLFSPENLAKTSIKLNGQAELFYRPKSRMK |
| | RMAHRLGEKMLNKKLKDQKTPIPDTLYQELYDYVNHRLSHDLSDEARALLPNVIT |
| | KEVSHEIIKDRRFTSDKFFFHVPITLNYQAANSPSKFNQRVNAYLKEHPETPIIGIDR |
| | GERNLIYITVIDSTGKILEQRSLNTIQQFDYQKKLDNREKERVAARQAWSVVGTIK |
| | DLKQGYLSQVIHEIVDLMIHYQAVVVLENLNFGFKSKRTGIAEKAVYQQFEKMLI |
| | DKLNCLVLKDYPAEKVGGVLNPYQLTDQFTSFAKMGTQSGFLFYVPAPYTSKIDP |
| | LTGFVDPFVWKTIKNHESRKHFLEGFDFLHYDVKTGDFILHFKMNRNLSFQRGLP |
| | GFMPAWDIVFEKNETQFDAKGTPFIAGKRIVPVIENHRFTGRYRDLYPANELIALLE |
| | EKGIVFRDGSNILPKLLENDDSHAIDTMVALIRSVLQMRNSNAATGEDYINSPVRD |
| | LNGVCFDSRFQNPEWPMDADANGAYHIALKGQLLLNHLKESKDLKLQNGISNQD |
| | WLAYIQELRN (SEQ ID NO: 64) |
| AsCas12a | MTQFEGFTNLYQVSKTLRFELIPQGKTLKHIQEQGFIEEDKARNDHYKELKPIIDRI |
| nickase (e.g., | YKTYADQCLQLVQLDWENLSAAIDSYRKEKTEETRNALIEEQATYRNAIHDYFIGR |
| R1226A) | TDNLTDAINKRHAEIYKGLFKAELFNGKVLKQLGTVTTTEHENALLRSFDKFTTYF |
| | SGFYENRKNVFSAEDISTAIPHRIVQDNFPKFKENCHIFTRLITAVPSLREHFENVKK |
| | AIGIFVSTSIEEVFSFPFYNQLLTQTQIDLYNQLLGGISREAGTEKIKGLNEVLNLAIQ |
| | KNDETAHIIASLPHRFIPLFKQILSDRNTLSFILEEFKSDEEVIQSFCKYKTLLRNENV |
| | LETAEALFNELNSIDLTHIFISHKKLETISSALCDHWDTLRNALYERRISELTGKITKS |
| | AKEKVQRSLKHEDINLQEIISAAGKELSEAFKQKTSEILSHAHAALDQPLPTTLKKQ |
| | EEKEILKSQLDSLLGLYHLLDWFAVDESNEVDPEFSARLTGIKLEMEPSLSFYNKA |
| | RNYATKKPYSVEKFKLNFQMPTLASGWDVNKEKNNGAILFVKNGLYYLGIMPKQ |
| | KGRYKALSFEPTEKTSEGFDKMYYDYFPDAAKMIPKCSTQLKAVTAHFQTHTTPIL |
| | LSNNFIEPLEITKEIYDLNNPEKEPKKFQTAYAKKTGDQKGYREALCKWIDFTRDFL |
| | SKYTKTTSIDLSSLRPSSQYKDLGEYYAELNPLLYHISFQRIAEKEIMDAVETGKLY |
| | LFQIYNKDFAKGHHGKPNLHTLYWTGLFSPENLAKTSIKLNGQAELFYRPKSRMK |
| | RMAHRLGEKMLNKKLKDQKTPIPDTLYQELYDYVNHRLSHDLSDEARALLPNVIT |
| | KEVSHEIIKDRRFTSDKFFFHVPITLNYQAANSPSKFNQRVNAYLKEHPETPIIGIDR |
| | GERNLIYITVIDSTGKILEQRSLNTIQQFDYQKKLDNREKERVAARQAWSVVGTIK |
| | DLKQGYLSQVIHEIVDLMIHYQAVVVLENLNFGFKSKRTGIAEKAVYQQFEKMLI |
| | DKLNCLVLKDYPAEKVGGVLNPYQLTDQFTSFAKMGTQSGFLFYVPAPYTSKIDP |
| | LTGFVDPFVWKTIKNHESRKHFLEGFDFLHYDVKTGDFILHFKMNRNLSFQRGLP |
| | GFMPAWDIVFEKNETQFDAKGTPFIAGKRIVPVIENHRFTGRYRDLYPANELIALLE |
| | EKGIVFRDGSNILPKLLENDDSHAIDTMVALIRSVLQMANSNAATGEDYINSPVRD |
| | LNGVCFDSRFQNPEWPMDADANGAYHIALKGQLLLNHLKESKDLKLQNGISNQD |
| | WLAYIQELRN (SEQ ID NO: 65) |
| LbCas12a | MNYKTGLEDFIGKESLSKTLRNALIPTESTKIHMEEMGVIRDDELRAEKQQELKEI |
| (previously | MDDYYRTFIEEKLGQIQGIQWNSLFQKMEETMEDISVRKDLDKIQNEKRKEICCYF |
| known as Cpf1) | TSDKRFKDLFNAKLITDILPNFIKDNKEYTEEEKAEKEQTRVLFQRFATAFTNYFNQ |
| Lachnospiraceae | RRNNFSEDNISTAISFRIVNENSEIHLQNMRAFQRIEQQYPEEVCGMEEEYKDMLQE |
| bacterium | WQMKHIYSVDFYDRELTQPGIEYYNGICGKINEHMNQFCQKNRINKNDFRMKKL |
| GAM79 | HKQILCKKSSYYEIPFRFESDQEVYDALNEFIKTMKKKEIIRRCVHLGQECDDYDLG |
| Ref Seq. | KIYISSNKYEQISNALYGSWDTIRKCIKEEYMDALPGKGEKKEEKAEAAAKKEEYR |
| WP_119623382.1 | SIADIDKIISLYGSEMDRTISAKKCITEICDMAGQISIDPLVCNSDIKLLQNKEKTTEIK |
| | TILDSFLHVYQWGQTFIVSDIIEKDSYFYSELEDVLEDFEGITTLYNHVRSYVTQKP |
| | YSTVKFKLHFGSPTLANGWSQSKEYDNNAILLMRDQKFYLGIFNVRNKPDKQIIKG |
| | HEKEEKGDYKKMIYNLLPGPSKMLPKVFITSRSGQETYKPSKHILDGYNEKRHIKS |
| | SPKFDLGYCWDLIDYYKECIHKHPDWKNYDFHFSDTKDYEDISGFYREVEMQGY |
| | QIKWTYISADEIQKLDEKGQIFLFQIYNKDFSVHSTGKDNLHTMYLKNLFSEENLK |
| | DIVLKLNGEAELFFRKASIKTPIVHKKGSVLVNRSYTQTVGNKEIRVSIPEEYYTEIY |
| | NYLNHIGKGKLSSEAQRYLDEGKIKSFTATKDIVKNYRYCCDHYFLHLPITINFKA |
| | KSDVAVNERTLAYIAKKEDIHIIGIDRGERNLLYISVVDVHGNIREQRSFNIVNGYD |
| | YQQKLKDREKSRDAARKNWEEIEKIKELKEGYLSMVIHYIAQLVVKYNAVVAME |
| | DLNYGFKTGRFKVERQVYQKFETMLIEKLHYLVFKDREVCEEGGVLRGYQLTYIP |
| | ESLKKVGKQCGFIFYVPAGYTSKIDPTTGFVNLFSFKNLTNRESRQDFVGKFDEIRY |
| | DRDKKMFEFSFDYNNYIKKGTILASTKWKVYTNGTRLKRIVVNGKYTSQSMEVEL |
| | TDAMEKMLQRAGIEYHDGKDLKGQIVEKGIEAEIIDIFRLTVQMRNSRSES EDREY |
| | DRLISPVLNDKGEFFDTATADKTLPQDADANGAYCIALKGLYEVKQIKENWKENE |
| | QFPRNKLVQDNKTWFDFMQKKRYL (SEQ ID NO: 66) |
| PcCas12a- | MAKNFEDFKRLYSLSKTLRFEAKPIGATLDNIVKSGLLDEDEHRAASYVKVKKLID |
| previously | EYHKVFIDRVLDDGCLPLENKGNNNSLAEYYESYVSRAQDEDAKKKFKEIQQNLR |
| known at | SVIAKKLTEDKAYANLFGNKLIESYKDKEDKKKIIDSDLIQFINTAESTQLDSMSQD |
| Cpf1 | EAKELVKEFWGFVTYFYGFFDNRKNMYTAEEKSTGIAYRLVNENLPKFIDNIEAFN |
| Prevotella | RAITRPEIQENMGVLYSDFSEYLNVESIQEMFQLDYYNMLLTQKQIDVYNAIIGGK |
| copri | TDDEHDVKIKGINEYINLYNQQHKDDKLPKLKALFKQILSDRNAISWLPEEFNSDQ |
| Ref Seq. | EVLNAIKDCYERLAENVLGDKVLKSLLGSLADYSLDGIFIRNDLQLTDISQKMFGN |
| WP_119227726.1 | WGVIQNAIMQNIKRVAPARKHKESEEDYEKRIAGIFKKADSFSISYINDCLNEADPN |
| | NAYFVENYFATFGAVNTPTMQRENLFALVQNAYTEVAALLHSDYPTVKHLAQDK |
| | ANVSKIKALLDAIKSLQHFVKPLLGKGDESDKDERFYGELASLWAELDTVTPLYN |
| | MIRNYMTRKPYSQKKIKLNFENPQLLGGWDANKEKDYATIILRRNGLYYLAIMDK |
| | DSRKLLGKAMPSDGECYEKMVYKFFKDVTTMIPKCSTQLKDVQAYFKVNTDDYV |
| | LNSKAFNKPLTITKEVFDLNNVLYGKYKKFQKGYLTATGDNVGYTHAVNVWIKF |
| | CMDFLNSYDSTCIYDFSSLKPESYLSLDAFYQDANLLLYKLSFARASVSYINQLVEE |
| | GKMYLFQIYNKDFSEYSKGTPNMHTLYWKALFDERNLADVVYKLNGQAEMFYR |
| | KKSIENTHPTHPANHPILNKNKDNKKKESLFDYDLIKDRRYTVDKFMFHVPITMNF |
| | KSVGSENINQDVKAYLRHADDMHIIGIDRGERHLLYLVVIDLQGNIKEQYSLNEIV |
| | NEYNGNTYHTNYHDLLDVREEERLKARQSWQTIENIKELKEGYLSQVIHKITQLM |
| | VRYHAIVVLEDLSKGFMRSRQKVEKQVYQKFEKMLIDKLNYLVDKKTDVSTPGG |
| | LLNAYQLTCKSDSSQKLGKQSGFLFYIPAWNTSKIDPVTGFVNLLDTHSLNSKEKI |
| | KAFFSKFDAIRYNKDKKWFEFNLDYDKFGKKAEDTRTKWTLCTRGMRIDTFRNK |
| | EKNSQWDNQEVDLTTEMKSLLEHYYIDIHGNLKDAISAQTDKAFFTGLLHILKLTL |
| | QMRNSITGTETDYLVSPVADENGIFYDSRSCGNQLPENADANGAYNIARKGLMLIE |
| | QIKNAEDLNNVKFDISNKAWLNFAQQKPYKNG (SEQ ID NO: 67) |
| ErCas12a- | MFSAKLISDILPEFVIHNNNYSASEKEEKTQVIKLFSRFATSFKDYFKNRANCFSAN |
| previously | DISSSSCHRIVNDNAEIFFSNALVYRRIVKNLSNDDINKISGDMKDSLKEMSLEEIYS |
| known at | YEKYGEFITQEGISFYNDICGKVNLFMNLYCQKNKENKNLYKLRKLHKQILCIADT |
| Cpf1 | SYEVPYKFESDEEVYQSVNGFLDNISSKHIVERLRKIGENYNGYNLDKIYIVSKFYE |
| Eubacterium | SVSQKTYRDWETINTALEIHYNNILPGNGKSKADKVKKAVKNDLQKSITEINELVS |
| rectale | NYKLCPDDNIKAETYIHEISHILNNFEAQELKYNPEIHLVESELKASELKNVLDVIM |
| Ref Seq. | NAFHWCSVFMTEELVDKDNNFYAELEEIYDEIYPVISLYNLVRNYVTQKPYSTKKI |
| WP_119223642.1 | KLNFGIPTLADGWSKSKEYSNNAIILMRDNLYYLGIFNAKNKPDKKIIEGNTSENK |
| | GDYKKMIYNLLPGPNKMIPKVFLSSKTGVETYKPSAYILEGYKQNKHLKSSKDFDI |
| | TFCHDLIDYFKNCIAIHPEWKNFGFDFSDTSTYEDISGFYREVELQGYKIDWTYISE |
| | KDIDLLQEKGQLYLFQIYNKDFSKKSSGNDNLHTMYLKNLFSEENLKDIVLKLNGE |
| | AEIFFRKSSIKNPIIHKKGSILVNRTYEAEEKDQFGNIQIVRKTIPENIYQELYKYFND |
| | KSDKELSDEAAKLKNVVGHHEAATNIVKDYRYTYDKYFLHMPITINFKANKTSFI |
| | NDRILQYIAKEKDLHVIGIDRGERNLIYVSVIDTCGNIVEQKSFNIVNGYDYQIKLK |
| | QQEGARQIARKEWKEIGKIKEIKEGYLSLVIHEISKMVIKYNAIIAMEDLSYGFKKG |
| | RFKVERQVYQKFETMLINKLNYLVFKDISITENGGLLKGYQLTYIPDKLKNVGHQC |
| | GCIFYVPAAYTSKIDPTTGFVNIFKFKDLTVDAKREFIKKFDSIRYDSDKNLFCFTFD |
| | YNNFITQNTVMSKSSWSVYTYGVRIKRRFVNGRFSNESDTIDITKDMEKTLEMTDI |
| | NWRDGHDLRQDIIDYEIVQHIFEIFKLTVQMRNSLSELEDRDYDRLISPVLNENNIF |
| | YDSAKAGDALPKDADANGAYCIALKGLYEIKQITENWKEDGKFSRDKLKISNKD |
| | WFDFIQNKRYL (SEQ ID NO: 68) |
| CsCas12a- | MNYKTGLEDFIGKESLSKTLRNALIPTESTKIHMEEMGVIRDDELRAEKQQELKEI |
| previously | MDDYYRAFIEEKLGQIQGIQWNSLFQKMEETMEDISVRKDLDKIQNEKRKEICCYF |
| known at | TSDKRFKDLFNAKLITDILPNFIKDNKEYTEEEKAEKEQTRVLFQRFATAFTNYFNQ |
| Cpf1 | RRNNFSEDNISTAISFRIVNENSEIHLQNMRAFQRIEQQYPEEVCGMEEEYKDMLQE |
| Clostridium | WQMKHIYLVDFYDRVLTQPGIEYYNGICGKINEHMNQFCQKNRINKNDFRMKKL |
| sp. AF34- | HKQILCKKSSYYEIPFRFESDQEVYDALNEFIKTMKEKEIICRCVHLGQKCDDYDLG |
| 10BH | KIYISSNKYEQISNALYGSWDTIRKCIKEEYMDALPGKGEKKEEKAEAAAKKEEYR |
| Ref Seq. | SIADIDKIISLYGSEMDRTISAKKCITEICDMAGQISTDPLVCNSDIKLLQNKEKTTEI |
| WP_118538418.1 | KTILDSFLHVYQWGQTFIVSDIIEKDSYFYSELEDVLEDFEGITTLYNHVRSYVTQK |
| | PYSTVKFKLHFGSPTLANGWSQSKEYDNNAILLMRDQKFYLGIFNVRNKPDKQIIK |
| | GHEKEEKGDYKKMIYNLLPGPSKMLPKVFITSRSGQETYKPSKHILDGYNEKRHIK |
| | SSPKFDLGYCWDLIDYYKECIHKHPDWKNYDFHFSDTKDYEDISGFYREVEMQGY |
| | QIKWTYISADEIQKLDEKGQIFLFQIYNKDFSVHSTGKDNLHTMYLKNLFSEENLK |
| | DIVLKLNGEAELFFRKASIKTPVVHKKGSVLVNRSYTQTVGDKEIRVSIPEEYYTEI |
| | YNYLNHIGRGKLSTEAQRYLEERKIKSFTATKDIVKNYRYCCDHYFLHLPITINFKA |
| | KSDIAVNERTLAYIAKKEDIHIIGIDRGERNLLYISVVDVHGNIREQRSFNIVNGYDY |
| | QQKLKDREKSRDAARKNWEEIEKIKELKEGYLSMVIHYIAQLVVKYNAVVAMED |
| | LNYGFKTGRFKVERQVYQKFETMLIEKLHYLVFKDREVCEEGGVLRGYQLTYIPE |
| | SLKKVGKQCGFIFYVPAGYTSKIDPTTGFVNLFSFKNLTNRESRQDFVGKFDEIRYD |
| | RDKKMFEFSFDYNNYIKKGTMLASTKWKVYTNGTRLKRIVVNGKYTSQSMEVEL |
| | TDAMEKMLQRAGIEYHDGKDLKGQIVEKGIEAEIIDIFRLTVQMRNSRSES EDREY |
| | DRLISPVLNDKGEFFDTATADKTLPQDADANGAYCIALKGLYEVKQIKENWKENE |
| | QFPRNKLVQDNKTWFDFMQKKRYL (SEQ ID NO: 69) |
| BhCas12b | MATRSFILKIEPNEEVKKGLWKTHEVLNHGIAYYMNILKLIRQEAIYEHHEQDPKN |
| Bacillus | PKKVSKAEIQAELWDFVLKMQKCNSFTHEVDKDEVFNILRELYEELVPSSVEKKG |
| hisashii | EANQLSNKFLYPLVDPNSQSGKGTASSGRKPRWYNLKIAGDPSWEEEKKKWEED |
| Ref Seq. | KKKDPLAKILGKLAEYGLIPLFIPYTDSNEPIVKEIKWMEKSRNQSVRRLDKDMFIQ |
| WP_095142515.1 | ALERFLSWESWNLKVKEEYEKVEKEYKTLEERIKEDIQALKALEQYEKERQEQLL |
| | RDTLNTNEYRLSKRGLRGWREIIQKWLKMDENEPSEKYLEVFKDYQRKHPREAG |
| | DYSVYEFLSKKENHFIWRNHPEYPYLYATFCEIDKKKKDAKQQATFTLADPINHPL |
| | WVRFEERSGSNLNKYRILTEQLHTEKLKKKLTVQLDRLIYPTESGGWEEKGKVDIV |
| | LLPSRQFYNQIFLDIEEKGKHAFTYKDESIKFPLKGTLGGARVQFDRDHLRRYPHK |
| | VESGNVGRIYFNMTVNIEPTESPVSKSLKIHRDDFPKVVNFKPKELTEWIKDSKGK |
| | KLKSGIESLEIGLRVMSIDLGQRQAAAASIFEVVDQKPDIEGKLFFPIKGTELYAVH |
| | RASFNIKLPGETLVKSREVLRKAREDNLKLMNQKLNFLRNVLHFQQFEDITEREKR |
| | VTKWISRQENSDVPLVYQDELIQIRELMYKPYKDWVAFLKQLHKRLEVEIGKEVK |
| | HWRKSLSDGRKGLYGISLKNIDEIDRTRKFLLRWSLRPTEPGEVRRLEPGQRFAIDQ |
| | LNHLNALKEDRLKKMANTIIMHALGYCYDVRKKKWQAKNPACQIILFEDLSNYN |
| | PYEERSRFENSKLMKWSRREIPRQVALQGEIYGLQVGEVGAQFSSRFHAKTGSPGI |
| | RCSVVTKEKLQDNRFFKNLQREGRLTLDKIAVLKEGDLYPDKGGEKFISLSKDRKC |
| | VTTHADINAAQNLQKRFWTRTHGFYKVYCKAYQVDGQTVYIPESKDQKQKIIEEF |
| | GEGYFILKDGVYEWVNAGKLKIKKGSSKQSSSELVDSDILKDSFDLASELKGEKLM |
| | LYRDPSGNVFPSDKWMAAGVFFGKLERILISKLTNQYSISTIEDDSSKQSM (SEQ ID |
| | NO: 70) |
| ThCas12b | MSEKTTQRAYTLRLNRASGECAVCQNNSCDCWHDALWATHKAVNRGAKAFGD |
| Thermomonas | WLLTLRGGLCHTLVEMEVPAKGNNPPQRPTDQERRDRRVLLALSWLSVEDEHGA |
| hydrothermalis | PKEFIVATGRDSADDRAKKVEEKLREILEKRDFQEHEIDAWLQDCGPSLKAHIRED |
| Ref Seq. | AVWVNRRALFDAAVERIKTLTWEEAWDFLEPFFGTQYFAGIGDGKDKDDAEGPA |
| WP_072754838 | RQGEKAKDLVQKAGQWLSARFGIGTGADFMSMAEAYEKIAKWASQAQNGDNGK |
| | ATIEKLACALRPSEPPTLDTVLKCISGPGHKSATREYLKTLDKKSTVTQEDLNQLRK |
| | LADEDARNCRKKVGKKGKKPWADEVLKDVENSCELTYLQDNSPARHREFSVML |
| | DHAARRVSMAHSWIKKAEQRRRQFESDAQKLKNLQERAPSAVEWLDRFCESRSM |
| | TTGANTGSGYRIRKRAIEGWSYVVQAWAEASCDTEDKRIAAARKVQADPEIEKFG |
| | DIQLFEALAADEAICVWRDQEGTQNPSILIDYVTGKTAEHNQKRFKVPAYRHPDEL |
| | RHPVFCDFGNSRWSIQFAIHKEIRDRDKGAKQDTRQLQNRHGLKMRLWNGRSMT |
| | DVNLHWSSKRLTADLALDQNPNPNPTEVTRADRLGRAASSAFDHVKIKNVFNEKE |
| | WNGRLQAPRAELDRIAKLEEQGKTEQAEKLRKRLRWYVSFSPCLSPSGPFIVYAG |
| | QHNIQPKRSGQYAPHAQANKGRARLAQLILSRLPDLRILSVDLGHRFAAACAVWE |
| | TLSSDAFRREIQGLNVLAGGSGEGDLFLHVEMTGDDGKRRTVVYRRIGPDQLLDN |
| | TPHPAPWARLDRQFLIKLQGEDEGVREASNEELWTVHKLEVEVGRTVPLIDRMVR |
| | SGFGKTEKQKERLKKLRELGWISAMPNEPSAETDEKEGEIRSISRSVDELMSSALGT |
| | LRLALKRHGNRARIAFAMTADYKPMPGGQKYYFHEAKEASKNDDETKRRDNQIE |
| | FLQDALSLWHDLFSSPDWEDNEAKKLWQNHIATLPNYQTPEEISAELKRVERNKK |
| | RKENRDKLRTAAKALAENDQLRQHLHDTWKERWESDDQQWKERLRSLKDWIFP |
| | RGKAEDNPSIRHVGGLSITRINTISGLYQILKAFKMRPEPDDLRKNIPQKGDDELEN |
| | FNRRLLEARDRLREQRVKQLASRIIEAALGVGRIKIPKNGKLPKRPRTTVDTPCHAV |
| | VIESLKTYRPDDLRTRRENRQLMQWSSAKVRKYLKEGCELYGLHFLEVPANYTSR |
| | QCSRTGLPGIRCDDVPTGDFLKAPWWRRAINTAREKNGGDAKDRFLVDLYDHLN |
| | NLQSKGEALPATVRVPRQGGNLFIAGAQLDDTNKERRAIQADLNAAANIGLRALL |
| | DPDWRGRWWYVPCKDGTSEPALDRIEGSTAFNDVRSLPTGDNSSRRAPREIENLW |
| | RDPSGDSLESGTWSPTRAYWDTVQSRVIELLRRHAGLPTS (SEQ ID NO: 71) |
| LsCas12b | MSIRSFKLKLKTKSGVNAEQLRRGLWRTHQLINDGIAYYMNWLVLLRQEDLFIRN |
| Laceyella | KETNEIEKRSKEEIQAVLLERVHKQQQRNQWSGEVDEQTLLQALRQLYEEIVPSVI |
| sacchari | GKSGNASLKARFFLGPLVDPNNKTTKDVSKSGPTPKWKKMKDAGDPNWVQEYE |
| WP_132221894.1 | KYMAERQTLVRLEEMGLIPLFPMYTDEVGDIHWLPQASGYTRTWDRDMFQQAIE |
| | RLLSWESWNRRVRERRAQFEKKTHDFASRFSESDVQWMNKLREYEAQQEKSLEE |
| | NAFAPNEPYALTKKALRGWERVYHSWMRLDSAASEEAYWQEVATCQTAMRGEF |
| | GDPAIYQFLAQKENHDIWRGYPERVIDFAELNHLQRELRRAKEDATFTLPDSVDHP |
| | LWVRYEAPGGTNIHGYDLVQDTKRNLTLILDKFILPDENGSWHEVKKVPFSLAKS |
| | KQFHRQVWLQEEQKQKKREVVFYDYSTNLPHLGTLAGAKLQWDRNFLNKRTQQ |
| | QIEETGEIGKVFFNISVDVRPAVEVKNGRLQNGLGKALTVLTHPDGTKIVTGWKAE |
| | QLEKWVGESGRVSSLGLDSLSEGLRVMSIDLGQRTSATVSVFEITKEAPDNPYKFF |
| | YQLEGTEMFAVHQRSFLLALPGENPPQKIKQMREIRWKERNRIKQQVDQLSAILRL |
| | HKKVNEDERIQAIDKLLQKVASWQLNEEIATAWNQALSQLYSKAKENDLQWNQA |
| | IKNAHHQLEPVVGKQISLWRKDLSTGRQGIAGLSLWSIEELEATKKLLTRWSKRSR |
| | EPGVVKRIERFETFAKQIQHHINQVKENRLKQLANLIVMTALGYKYDQEQKKWIE |
| | VYPACQVVLFENLRSYRFSFERSRRENKKLMEWSHRSIPKLVQMQGELFGLQVAD |
| | VYAAYSSRYHGRTGAPGIRCHALTEADLRNETNIIHELIEAGFIKEEHRPYLQQGDL |
| | VPWSGGELFATLQKPYDNPRILTLHADINAAQNIQKRFWHPSMWFRVNCESVMEG |
| | EIVTYVPKNKTVHKKQGKTFRFVKVEGSDVYEWAKWSKNRNKNTFSSITERKPPS |
| | SMILFRDPSGTFFKEQEWVEQKTFWGKVQSMIQAYMKKTIVQRMEE (SEQ ID NO: |
| | 72) |
| DtCas12b | MVLGRKDDTAELRRALWTTHEHVNLAVAEVERVLLRCRGRSYWTLDRRGDPVH |
| Dsulfonatronum | VPESQVAEDALAMAREAQRRNGWPVVGEDEEILLALRYLYEQIVPSCLLDDLGKP |
| thiodismutans | LKGDAQKIGTNYAGPLFDSDTCRRDEGKDVACCGPFHEVAGKYLGALPEWATPIS |
| WP_031386437 | KQEFDGKDASHLRFKATGGDDAFFRVSIEKANAWYEDPANQDALKNKAYNKDD |
| | WKKEKDKGISSWAVKYIQKQLQLGQDPRTEVRRKLWLELGLLPLFIPVFDKTMVG |
| | NLWNRLAVRLALAHLLSWESWNHRAVQDQALARAKRDELAALFLGMEDGFAGL |
| | REYELRRNESIKQHAFEPVDRPYVVSGRALRSWTRVREEWLRHGDTQESRKNICN |
| | RLQDRLRGKFGDPDVFHWLAEDGQEALWKERDCVTSFSLLNDADGLLEKRKGYA |
| | LMTFADARLHPRWAMYEAPGGSNLRTYQIRKTENGLWADVVLLSPRNESAAVEE |
| | KTFNVRLAPSGQLSNVSFDQIQKGSKMVGRCRYQSANQQFEGLLGGAEILFDRKRI |
| | ANEQHGATDLASKPGHVWFKLTLDVRPQAPQGWLDGKGRPALPPEAKHFKTALS |
| | NKSKFADQVRPGLRVLSVDLGVRSFAACSVFELVRGGPDQGTYFPAADGRTVDDP |
| | EKLWAKHERSFKITLPGENPSRKEEIARRAAMEELRSLNGDIRRLKAILRLSVLQED |
| | DPRTEHLRLFMEAIVDDPAKSALNAELFKGFGDDRFRSTPDLWKQHCHFFHDKAE |
| | KVVAERFSRWRTETRPKSSSWQDWRERRGYAGGKSYWAVTYLEAVRGLILRWN |
| | MRGRTYGEVNRQDKKQFGTVASALLHHINQLKEDRIKTGADMIIQAARGFVPRKN |
| | GAGWVQVHEPCRLILFEDLARYRFRTDRSRRENSRLMRWSHREIVNEVGMQGEL |
| | YGLHVDTTEAGFSSRYLASSGAPGVRCRHLVEEDFHDGLPGMHLVGELDWLLPK |
| | DKDRTANEARRLLGGMVRPGMLVPWDGGELFATLNAASQLHVIHADINAAQNLQ |
| | RRFWGRCGEAIRIVCNQLSVDGSTRYEMAKAPKARLLGALQQLKNGDAPFHLTSI |
| | PNSQKPENSYVMTPTNAGKKYRAGPGEKSSGEEDELALDIVEQAEELAQGRKTFF |
| | RDPSGVFFAPDRWLPSEIYWSRIRRRIWQVTLERNSSGRQERAEMDEMPY (SEQ ID |
| | NO: 73) |

[0410] The multi-flap prime editors described herein may also comprise Cas12a (Cpf1) (dCpf1) variants that may be used as a guide nucleotide sequence-programmable DNA-binding protein domain The Cas12a (Cpf1) protein has a RuvC-like endonuclease domain that is similar to the RuvC domain of Cas9 but does not have a HNH endonuclease domain, and the N-terminal of Cas12a (Cpf1) does not have the alfa-helical recognition lobe of Cas9. It was shown in Zetsche et al., Cell, 163, 759-771, 2015 (which is incorporated herein by reference) that, the RuvC-like domain of Cas12a (Cpf1) is responsible for cleaving both DNA strands and inactivation of the RuvC-like domain inactivates Cas12a (Cpf1) nuclease activity.

[0411] In some embodiments, the napDNAbp is a single effector of a microbial CRISPR-Cas system. Single effectors of microbial CRISPR-Cas systems include, without limitation, Cas9, Cas12a (Cpf1), Cas12b1 (C2c1), Cas13a (C2c2), and Cas12c (C2c3). Typically, microbial CRISPR-Cas systems are divided into Class 1 and Class 2 systems. Class 1 systems have multi-subunit effector complexes, while Class 2 systems have a single protein effector. For example, Cas9 and Cas12a (Cpf1) are Class 2 effectors. In addition to Cas9 and Cas12a (Cpf1), three distinct Class 2 CRISPR-Cas systems (Cas12b1, Cas13a, and Cas12c) have been described by Shmakov et al., “Discovery and Functional Characterization of Diverse Class 2 CRISPR Cas Systems”, Mol. Cell, 2015 Nov 5; 60(3): 385-397, the entire contents of which are hereby incorporated by reference.

[0412] Effectors of two of the systems, Cas12b1 and Cas12c, contain RuvC-like endonuclease domains related to Cas12a. A third system, Cas13a contains an effector with two predicted HEPN RNase domains. Production of mature CRISPR RNA is tracrRNA-independent, unlike production of CRISPR RNA by Cas12b1. Cas12b1 depends on both CRISPR RNA and tracrRNA for DNA cleavage. Bacterial Cas13a has been shown to possess a unique RNase activity for CRISPR RNA maturation distinct from its RNA-activated single-stranded RNA degradation activity. These RNase functions are different from each other and from the CRISPR RNA-processing behavior of Cas12a. See, e.g., East-Seletsky, et al., “Two distinct RNase activities of CRISPR-Cas13a enable guide-RNA processing and RNA detection”, Nature, 2016 Oct 13; 538(7624):270-273, the entire contents of which are hereby incorporated by reference. In vitro biochemical analysis of Cas13a in Leptotrichia shahii has shown that Cas13a is guided by a single CRISPR RNA and can be programed to cleave ssRNA targets carrying complementary protospacers. Catalytic residues in the two conserved HEPN domains mediate cleavage. Mutations in the catalytic residues generate catalytically inactive RNA-binding proteins. See e.g., Abudayyeh et al., “C2c2 is a single-component programmable RNA-guided RNA-targeting CRISPR effector”, Science, 2016 Aug 5; 353(6299), the entire contents of which are hereby incorporated by reference.

[0413] The crystal structure of Alicyclobaccillus acidoterrastris Cas12b1 (AacC2c1) has been reported in complex with a chimeric single-molecule guide RNA (sgRNA). See e.g., Liu et al., “C2c1-sgRNA Complex Structure Reveals RNA-Guided DNA Cleavage Mechanism”, Mol. Cell, 2017 Jan 19; 65(2):310-322, the entire contents of which are hereby incorporated by reference. The crystal structure has also been reported in Alicyclobacillus acidoterrestris C2c1 bound to target DNAs as ternary complexes. See e.g., Yang et al., “PAM-dependent Target DNA Recognition and Cleavage by C2C1 CRISPR-Cas endonuclease”, Cell, 2016 Dec 15; 167(7):1814-1828, the entire contents of which are hereby incorporated by reference. Catalytically competent conformations of AacC2c1, both with target and non-target DNA strands, have been captured independently positioned within a single RuvC catalytic pocket, with C2c1-mediated cleavage resulting in a staggered seven-nucleotide break of target DNA. Structural comparisons between C2c1 ternary complexes and previously identified Cas9 and Cpf1 counterparts demonstrate the diversity of mechanisms used by CRISPR-Cas9 systems.

[0414] In some embodiments, the napDNAbp may be a C2c1, a C2c2, or a C2c3 protein. In some embodiments, the napDNAbp is a C2c1 protein. In some embodiments, the napDNAbp is a Cas13a protein. In some embodiments, the napDNAbp is a Cas12c protein. In some embodiments, the napDNAbp comprises an amino acid sequence that is at least 85%, at least 90%, at least 91%, at least 92%, at least 93%, at least 94%, at least 95%, at least 96%, at least 97%, at least 98%, at least 99%, or at least 99.5% identical to a naturally-occurring Cas12bl (C2c1), Cas13a (C2c2), or Cas12c (C2c3) protein. In some embodiments, the napDNAbp is a naturally-occurring Cas12bl (C2c1), Cas13a (C2c2), or Cas12c (C2c3) protein.

[0415] H. Cas9 Circular Permutants

[0416] In various embodiments, the multi-flap prime editors disclosed herein may comprise a circular permutant of Cas9.

[0417] The term “circularly permuted Cas9” or “circular permutant” of Cas9 or “CP-Cas9”) refers to any Cas9 protein, or variant thereof, that occurs or has been modify to engineered as a circular permutant variant, which means the N-terminus and the C-terminus of a Cas9 protein (e.g., a wild type Cas9 protein) have been topically rearranged. Such circularly permuted Cas9 proteins, or variants thereof, retain the ability to bind DNA when complexed with a guide RNA (gRNA). See, Oakes et al., “Protein Engineering of Cas9 for enhanced function,” Methods Enzymol, 2014, 546: 491-511 and Oakes et al., “CRISPR-Cas9 Circular Permutants as Programmable Scaffolds for Genome Modification,” Cell, Jan. 10, 2019, 176: 254-267, each of are incorporated herein by reference. The instant disclosure contemplates any previously known CP-Cas9 or use a new CP-Cas9 so long as the resulting circularly permuted protein retains the ability to bind DNA when complexed with a guide RNA (gRNA).

[0418] Any of the Cas9 proteins described herein, including any variant, ortholog, or naturally occurring Cas9 or equivalent thereof, may be reconfigured as a circular permutant variant.

[0419] In various embodiments, the circular permutants of Cas9 may have the following structure: N-terminus-[original C-terminus]-[optional linker]-[original N-terminus]-C-terminus.

[0420] As an example, the present disclosure contemplates the following circular permutants of canonical S. pyogenes Cas9 (1368 amino acids of UniProtKB-Q99ZW2 (CAS9_STRP1) (numbering is based on the amino acid position in SEQ ID NO: 18)):
[0421] N-terminus-[1268-1368]-[optional linker]-[1-1267]-C-terminus;
[0422] N-terminus-[1168-1368]-[optional linker]-[1-1167]-C-terminus;
[0423] N-terminus-[1068-1368]-[optional linker]-[1-1067]-C-terminus;
[0424] N-terminus-[968-1368]-[optional linker]-[1-967]-C-terminus;
[0425] N-terminus-[868-1368]-[optional linker]-[1-867]-C-terminus;
[0426] N-terminus-[768-1368]-[optional linker]-[1-767]-C-terminus;
[0427] N-terminus-[668-1368]-[optional linker]-[1-667]-C-terminus;
[0428] N-terminus-[568-1368]-[optional linker]-[1-567]-C-terminus;
[0429] N-terminus-[468-1368]-[optional linker]-[1-467]-C-terminus;
[0430] N-terminus-[368-1368]-[optional linker]-[1-367]-C-terminus;
[0431] N-terminus-[268-1368]-[optional linker]-[1-267]-C-terminus;
[0432] N-terminus-[168-1368]-[optional linker]-[1-167]-C-terminus;
[0433] N-terminus-[68-1368]-[optional linker]-[1-67]-C-terminus; or
[0434] N-terminus-[10-1368]-[optional linker]-[1-9]-C-terminus, or the corresponding circular permutants of other Cas9 proteins (including other Cas9 orthologs, variants, etc).

[0435] In particular embodiments, the circular permuant Cas9 has the following structure (based on S. pyogenes Cas9 (1368 amino acids of UniProtKB-Q99ZW2 (CAS9_STRP1) (numbering is based on the amino acid position in SEQ ID NO: 18):
[0436] N-terminus-[102-1368]-[optional linker]-[1-101]-C-terminus;
[0437] N-terminus-[1028-1368]-[optional linker]-[1-1027]-C-terminus;
[0438] N-terminus-[1041-1368]-[optional linker]-[1-1043]-C-terminus;
[0439] N-terminus-[1249-1368]-[optional linker]-[1-1248]-C-terminus; or
[0440] N-terminus-[1300-1368]-[optional linker]-[1-1299]-C-terminus, or the corresponding circular permutants of other Cas9 proteins (including other Cas9 orthologs, variants, etc).

[0441] In still other embodiments, the circular permuant Cas9 has the following structure (based on S. pyogenes Cas9 (1368 amino acids of UniProtKB-Q99ZW2 (CAS9_STRP1) (numbering is based on the amino acid position in SEQ ID NO: 18):
[0442] N-terminus-[103-1368]-[optional linker]-[1-102]-C-terminus;
[0443] N-terminus-[1029-1368]-[optional linker]-[1-1028]-C-terminus;
[0444] N-terminus-[1042-1368]-[optional linker]-[1-1041]-C-terminus;
[0445] N-terminus-[1250-1368]-[optional linker]-[1-1249]-C-terminus; or
[0446] N-terminus-[1301-1368]-[optional linker]-[1-1300]-C-terminus, or the corresponding circular permutants of other Cas9 proteins (including other Cas9 orthologs, variants, etc).

[0447] In some embodiments, the circular permutant can be formed by linking a C-terminal fragment of a Cas9 to an N-terminal fragment of a Cas9, either directly or by using a linker, such as an amino acid linker. In some embodiments, The C-terminal fragment may correspond to the C-terminal 95% or more of the amino acids of a Cas9 (e g , amino acids about 1300-1368), or the C-terminal 90%, 85%, 80%, 75%, 70%, 65%, 60%, 55%, 50%, 45%, 40%, 35%, 30%, 25%, 20%, 15%, 10%, or 5% or more of a Cas9 (e.g., any one of SEQ ID NOs: 77-86). The N-terminal portion may correspond to the N-terminal 95% or more of the amino acids of a Cas9 (e g , amino acids about 1-1300), or the N-terminal 90%, 85%, 80%, 75%, 70%, 65%, 60%, 55%, 50%, 45%, 40%, 35%, 30%, 25%, 20%, 15%, 10%, or 5% or more of a Cas9 (e.g., of SEQ ID NO: 18).

[0448] In some embodiments, the circular permutant can be formed by linking a C-terminal fragment of a Cas9 to an N-terminal fragment of a Cas9, either directly or by using a linker, such as an amino acid linker. In some embodiments, the C-terminal fragment that is rearranged to the N-terminus includes or corresponds to the C-terminal 30% or less of the amino acids of a Cas9 (e g , amino acids 1012-1368 of SEQ ID NO: 18). In some embodiments, the C-terminal fragment that is rearranged to the N-terminus, includes or corresponds to the C-terminal 30%, 29%, 28%, 27%, 26%, 25%, 24%, 23%, 22%, 21%, 20%, 19%, 18%, 17%, 16%, 15%, 14%, 13%, 12%, 11%, 10%, 9%, 8%, 7%, 6%, 5%, 4%, 3%, 2%, or 1% of the amino acids of a Cas9 (e.g., the Cas9 of SEQ ID NO: 18). In some embodiments, the C-terminal fragment that is rearranged to the N-terminus, includes or corresponds to the C-terminal 410 residues or less of a Cas9 (e.g., the Cas9 of SEQ ID NO: 18). In some embodiments, the C-terminal portion that is rearranged to the N-terminus, includes or corresponds to the C-terminal 410, 400, 390, 380, 370, 360, 350, 340, 330, 320, 310, 300, 290, 280, 270, 260, 250, 240, 230, 220, 210, 200, 190, 180, 170, 160, 150, 140, 130, 120, 110, 100, 90, 80, 70, 60, 50, 40, 30, 20, or 10 residues of a Cas9 (e.g., the Cas9 of SEQ ID NO: 18). In some embodiments, the C-terminal portion that is rearranged to the N-terminus includes or corresponds to the C-terminal 357, 341, 328, 120, or 69 residues of a Cas9 (e.g., the Cas9 of SEQ ID NO: 18).

[0449] In other embodiments, circular permutant Cas9 variants may be defined as a topological rearrangement of a Cas9 primary structure based on the following method, which is based on S. pyogenes Cas9 of SEQ ID NO: 18: (a) selecting a circular permutant (CP) site corresponding to an internal amino acid residue of the Cas9 primary structure, which dissects the original protein into two halves: an N-terminal region and a C-terminal region; (b) modifying the Cas9 protein sequence (e.g., by genetic engineering techniques) by moving the original C-terminal region (comprising the CP site amino acid) to precede the original N-terminal region, thereby forming a new N-terminus of the Cas9 protein that now begins with the CP site amino acid residue. The CP site can be located in any domain of the Cas9 protein, including, for example, the helical-II domain, the RuvCIII domain, or the CTD domain. For example, the CP site may be located (relative the S. pyogenes Cas9 of SEQ ID NO: 18) at original amino acid residue 181, 199, 230, 270, 310, 1010, 1016, 1023, 1029, 1041, 1247, 1249, or 1282. Thus, once relocated to the N-terminus, original amino acid 181, 199, 230, 270, 310, 1010, 1016, 1023, 1029, 1041, 1247, 1249, or 1282 would become the new N-terminal amino acid. Nomenclature of these CP-Cas9 proteins may be referred to as Cas9-CP¹⁸¹, Cas9-CP¹⁹⁹, Cas9-CP²³⁰, Cas9-CP²⁷⁰, Cas9-CP310, Cas9-CP¹⁰¹⁰, Cas9-CP¹⁰¹⁶, Cas9-CP¹⁰²³, Cas9-CP¹⁰²⁹, Cas9-CP¹⁰⁴¹, Cas9-CP¹²⁴⁷, Cas9-CP¹²⁴⁹, and Cas9-CP¹²⁸², respectively. This description is not meant to be limited to making CP variants from SEQ ID NO: 18, but may be implemented to make CP variants in any Cas9 sequence, either at CP sites that correspond to these positions, or at other CP sites entirely. This description is not meant to limit the specific CP sites in any way. Virtually any CP site may be used to form a CP-Cas9 variant.

[0450] Exemplary CP-Cas9 amino acid sequences, based on the Cas9 of SEQ ID NO: 18, are provided below in which linker sequences are indicated by underlining and optional methionine (M) residues are indicated in bold. It should be appreciated that the disclosure provides CP-Cas9 sequences that do not include a linker sequence or that include different linker sequences. It should be appreciated that CP-Cas9 sequences may be based on Cas9 sequences other than that of SEQ ID NO: 18 and any examples provided herein are not meant to be limiting. Exemplary CP-Cas9 sequences are as follows:

| CP name | Sequence | SEQ ID NO: |
|---|---|---|
| CP1012 | DYKVYDVRKMIAKSEQEIGKATAKYFFYSNIMNFFKTEITLA | SEQ ID NO: 77 |
| | NGEIRKRPLIETNGETGEIVWDKGRDFATVRKVLSMPQVNIV | |
| | KKTEVQTGGFSKESILPKRNSDKLIARKKDWDPKKYGGFDS | |
| | PTVAYSVLVVAKVEKGKSKKLKSVKELLGITIMERSSFEKNPI | |
| | DFLEAKGYKEVKKDLIIKLPKYSLFELENGRKRMLASAGEL | |
| | QKGNELALPSKYVNFLYLASHYEKLKGSPEDNEQKQLFVEQ | |
| | HKHYLDEIIEQISEFSKRVILADANLDKVLSAYNKHRDKPIRE | |
| | QAENIIHLFTLTNLGAPAAFKYFDTTIDRKRYTSTKEVLDATL | |
| | IHQSITGLYETRIDLSQLGGDGGSGGSGGSGGSGGSGGSGGD | |
| | KKYSIGLAIGTNSVGWAVITDEYKVPSKKFKVLGNTDRHSIK | |
| | KNLIGALLFDSGETAEATRLKRTARRRYTRRKNRICYLQEIFS | |
| | NEMAKVDDSFFHRLEESFLVEEDKKHERHPIFGNIVDEVAYH | |
| | EKYPTIYHLRKKLVDSTDKADLRLIYLALAHMIKFRGHFLIE | |
| | GDLNPDNSDVDKLFIQLVQTYNQLFEENPINASGVDAKAILS | |
| | ARLSKSRRLENLIAQLPGEKKNGLFGNLIALSLGLTPNFKSNF | |
| | DLAEDAKLQLSKDTYDDDLDNLLAQIGDQYADLFLAAKNL | |
| | SDAILLSDILRVNTEITKAPLSASMIKRYDEHHQDLTLLKALV | |
| | RQQLPEKYKEIFFDQSKNGYAGYIDGGASQEEFYKFIKPILEK | |
| | MDGTEELLVKLNREDLLRKQRTFDNGSIPHQIHLGELHAILR | |
| | RQEDFYPFLKDNREKIEKILTFRIPYYVGPLARGNSRFAWMT | |
| | RKSEETITPWNFEEVVDKGASAQSFIERMTNFDKNLPNEKV | |
| | LPKHSLLYEYFTVYNELTKVKYVTEGMRKPAFLSGEQKKAI | |
| | VDLLFKTNRKVTVKQLKEDYFKKIECFDSVEISGVEDRFNAS | |
| | LGTYHDLLKIIKDKDFLDNEENEDILEDIVLTLTLFEDREMIE | |
| | ERLKTYAHLFDDKVMKQLKRRRYTGWGRLSRKLINGIRDK | |
| | QSGKTILDFLKSDGFANRNFMQLIHDDSLTFKEDIQKAQVSG | |
| | QGDSLHEHIANLAGSPAIKKGILQTVKVVDELVKVMGRHKP | |
| | ENIVIEMARENQTTQKGQKNSRERMKRIEEGIKELGSQILKE | |
| | HPVENTQLQNEKLYLYYLQNGRDMYVDQELDINRLSDYDV | |
| | DHIVPQSFLKDDSIDNKVLTRSDKNRGKSDNVPSEEVVKKM | |
| | KNYWRQLLNAKLITQRKFDNLTKAERGGLSELDKAGFIKRQ | |
| | LVETRQITKHVAQILDSRMNTKYDENDKLIREVKVITLKSKL | |
| | VSDFRKDFQFYKVREINNYHHAHDAYLNAVVGTALIKKYPK | |
| | LESEFVYG | |
| CP1028 | EIGKATAKYFFYSNIMNFFKTEITLANGEIRKRPLIETNGETG | SEQ ID NO: 78 |
| | EIVWDKGRDFATVRKVLSMPQVNIVKKTEVQTGGFSKESIL | |
| | PKRNSDKLIARKKDWDPKKYGGFDSPTVAYSVLVVAKVEK | |
| | GKSKKLKSVKELLGITIMERSSFEKNPIDFLEAKGYKEVKKD | |
| | LIIKLPKYSLFELENGRKRMLASAGELQKGNELALPSKYVNF | |
| | LYLASHYEKLKGSPEDNEQKQLFVEQHKHYLDEIIEQISEFS | |
| | KRVILADANLDKVLSAYNKHRDKPIREQAENIIHLFTLTNLG | |
| | APAAFKYFDTTIDRKRYTSTKEVLDATLIHQSITGLYETRIDL | |
| | SQLGGDGGSGGSGGSGGSGGSGGSGGMDKKYSIGLAIGTNS | |
| | VGWAVITDEYKVPSKKFKVLGNTDRHSIKKNLIGALLFDSG | |
| | ETAEATRLKRTARRRYTRRKNRICYLQEIFSNEMAKVDDSF | |
| | FHRLEESFLVEEDKKHERHPIFGNIVDEVAYHEKYPTIYHLR | |
| | KKLVDSTDKADLRLIYLALAHMIKFRGHFLIEGDLNPDNSD | |
| | VDKLFIQLVQTYNQLFEENPINASGVDAKAILSARLSKSRRL | |
| | ENLIAQLPGEKKNGLFGNLIALSLGLTPNFKSNFDLAEDAKL | |
| | QLSKDTYDDDLDNLLAQIGDQYADLFLAAKNLSDAILLSDI | |
| | LRVNTEITKAPLSASMIKRYDEHHQDLTLLKALVRQQLPEK | |
| | YKEIFFDQSKNGYAGYIDGGASQEEFYKFIKPILEKMDGTEE | |
| | LLVKLNREDLLRKQRTFDNGSIPHQIHLGELHAILRRQEDFY | |
| | PFLKDNREKIEKILTFRIPYYVGPLARGNSRFAWMTRKSEETI | |
| | TPWNFEEVVDKGASAQSFIERMTNFDKNLPNEKVLPKHSLL | |
| | YEYFTVYNELTKVKYVTEGMRKPAFLSGEQKKAIVDLLFKT | |
| | NRKVTVKQLKEDYFKKIECFDSVEISGVEDRFNASLGTYHD | |
| | LLKIIKDKDFLDNEENEDILEDIVLTLTLFEDREMIEERLKTY | |
| | AHLFDDKVMKQLKRRRYTGWGRLSRKLINGIRDKQSGKTIL | |
| | DFLKSDGFANRNFMQLIHDDSLTFKEDIQKAQVSGQGDSLH | |
| | EHIANLAGSPAIKKGILQTVKVVDELVKVMGRHKPENIVIE | |
| | MARENQTTQKGQKNSRERMKRIEEGIKELGSQILKEHPVEN | |
| | TQLQNEKLYLYYLQNGRDMYVDQELDINRLSDYDVDHIVP | |
| | QSFLKDDSIDNKVLTRSDKNRGKSDNVPSEEVVKKMKNYW | |
| | RQLLNAKLITQRKFDNLTKAERGGLSELDKAGFIKRQLVET | |
| | RQITKHVAQILDSRMNTKYDENDKLIREVKVITLKSKLVSDF | |
| | RKDFQFYKVREINNYHHAHDAYLNAVVGTALIKKYPKLES | |
| | EFVYGDYKVYDVRKMIAKSEQ | |
| CP1041 | NIMNFFKTEITLANGEIRKRPLIETNGETGEIVWDKGRDFAT | SEQ ID NO: 79 |
| | VRKVLSMPQVNIVKKTEVQTGGFSKESILPKRNSDKLIARKK | |
| | DWDPKKYGGFDSPTVAYSVLVVAKVEKGKSKKLKSVKELL | |
| | GITIMERSSFEKNPIDFLEAKGYKEVKKDLIIKLPKYSLFELE | |
| | NGRKRMLASAGELQKGNELALPSKYVNFLYLASHYEKLKG | |
| | SPEDNEQKQLFVEQHKHYLDEIIEQISEFSKRVILADANLDK | |
| | VLSAYNKHRDKPIREQAENIIHLFTLTNLGAPAAFKYFDTTI | |
| | DRKRYTSTKEVLDATLIHQSITGLYETRIDLSQLGGDGGSGG | |
| | SGGSGGSGGSGGSGGDKKYSIGLAIGTNSVGWAVITDEYKV | |
| | PSKKFKVLGNTDRHSIKKNLIGALLFDSGETAEATRLKRTAR | |
| | RRYTRRKNRICYLQEIFSNEMAKVDDSFFHRLEESFLVEEDK | |
| | KHERHPIFGNIVDEVAYHEKYPTIYHLRKKLVDSTDKADLR | |
| | LIYLALAHMIKFRGHFLIEGDLNPDNSDVDKLFIQLVQTYNQ | |
| | LFEENPINASGVDAKAILSARLSKSRRLENLIAQLPGEKKNG | |
| | LFGNLIALSLGLTPNFKSNFDLAEDAKLQLSKDTYDDDLDN | |
| | LLAQIGDQYADLFLAAKNLSDAILLSDILRVNTEITKAPLSAS | |
| | MIKRYDEHHQDLTLLKALVRQQLPEKYKEIFFDQSKNGYAG | |
| | YIDGGASQEEFYKFIKPILEKMDGTEELLVKLNREDLLRKQR | |
| | TFDNGSIPHQIHLGELHAILRRQEDFYPFLKDNREKIEKILTFR | |
| | IPYYVGPLARGNSRFAWMTRKSEETITPWNFEEVVDKGASA | |
| | QSFIERMTNFDKNLPNEKVLPKHSLLYEYFTVYNELTKVKY | |
| | VTEGMRKPAFLSGEQKKAIVDLLFKTNRKVTVKQLKEDYF | |
| | KKIECFDSVEISGVEDRFNASLGTYHDLLKIIKDKDFLDNEE | |
| | NEDILEDIVLTLTLFEDREMIEERLKTYAHLFDDKVMKQLKR | |
| | RRYTGWGRLSRKLINGIRDKQSGKTILDFLKSDGFANRNFM | |
| | QLIHDDSLTFKEDIQKAQVSGQGDSLHEHIANLAGSPAIKKG | |
| | ILQTVKVVDELVKVMGRHKPENIVIEMARENQTTQKGQKN | |
| | SRERMKRIEEGIKELGSQILKEHPVENTQLQNEKLYLYYLQN | |
| | GRDMYVDQELDINRLSDYDVDHIVPQSFLKDDSIDNKVLTR | |
| | SDKNRGKSDNVPSEEVVKKMKNYWRQLLNAKLITQRKFDN | |
| | LTKAERGGLSELDKAGFIKRQLVETRQITKHVAQILDSRMN | |
| | TKYDENDKLIREVKVITLKSKLVSDFRKDFQFYKVREINNY | |
| | HHAHDAYLNAVVGTALIKKYPKLESEFVYGDYKVYDVRK | |
| | MIAKSEQEIGKATAKYFFYS | |
| CP1249 | PEDNEQKQLFVEQHKHYLDEIIEQISEFSKRVILADANLDKV | SEQ ID NO: 80 |
| | LSAYNKHRDKPIREQAENIIHLFTLTNLGAPAAFKYFDTTIDR | |
| | KRYTSTKEVLDATLIHQSITGLYETRIDLSQLGGDGGSGGSG | |
| | GSGGSGGSGGSGGMDKKYSIGLAIGTNSVGWAVITDEYKV | |
| | PSKKFKVLGNTDRHSIKKNLIGALLFDSGETAEATRLKRTAR | |
| | RRYTRRKNRICYLQEIFSNEMAKVDDSFFHRLEESFLVEEDK | |
| | KHERHPIFGNIVDEVAYHEKYPTIYHLRKKLVDSTDKADLR | |
| | LIYLALAHMIKFRGHFLIEGDLNPDNSDVDKLFIQLVQTYNQ | |
| | LFEENPINASGVDAKAILSARLSKSRRLENLIAQLPGEKKNG | |
| | LFGNLIALSLGLTPNFKSNFDLAEDAKLQLSKDTYDDDLDN | |
| | LLAQIGDQYADLFLAAKNLSDAILLSDILRVNTEITKAPLSAS | |
| | MIKRYDEHHQDLTLLKALVRQQLPEKYKEIFFDQSKNGYAG | |
| | YIDGGASQEEFYKFIKPILEKMDGTEELLVKLNREDLLRKQR | |
| | TFDNGSIPHQIHLGELHAILRRQEDFYPFLKDNREKIEKILTFR | |
| | IPYYVGPLARGNSRFAWMTRKSEETITPWNFEEVVDKGASA | |
| | QSFIERMTNFDKNLPNEKVLPKHSLLYEYFTVYNELTKVKY | |
| | VTEGMRKPAFLSGEQKKAIVDLLFKTNRKVTVKQLKEDYF | |
| | KKIECFDSVEISGVEDRFNASLGTYHDLLKIIKDKDFLDNEE | |
| | NEDILEDIVLTLTLFEDREMIEERLKTYAHLFDDKVMKQLKR | |
| | RRYTGWGRLSRKLINGIRDKQSGKTILDFLKSDGFANRNFM | |
| | QLIHDDSLTFKEDIQKAQVSGQGDSLHEHIANLAGSPAIKKG | |
| | ILQTVKVVDELVKVMGRHKPENIVIEMARENQTTQKGQKN | |
| | SRERMKRIEEGIKELGSQILKEHPVENTQLQNEKLYLYYLQN | |
| | GRDMYVDQELDINRLSDYDVDHIVPQSFLKDDSIDNKVLTR | |
| | SDKNRGKSDNVPSEEVVKKMKNYWRQLLNAKLITQRKFDN | |
| | LTKAERGGLSELDKAGFIKRQLVETRQITKHVAQILDSRMN | |
| | TKYDENDKLIREVKVITLKSKLVSDFRKDFQFYKVREINNY | |
| | HHAHDAYLNAVVGTALIKKYPKLESEFVYGDYKVYDVRK | |
| | MIAKSEQEIGKATAKYFFYSNIMNFFKTEITLANGEIRKRPLI | |
| | ETNGETGEIVWDKGRDFATVRKVLSMPQVNIVKKTEVQTG | |
| | GFSKESILPKRNSDKLIARKKDWDPKKYGGFDSPTVAYSVL | |
| | VVAKVEKGKSKKLKSVKELLGITIMERSSFEKNPIDFLEAKG | |
| | YKEVKKDLIIKLPKYSLFELENGRKRMLASAGELQKGNELA | |
| | LPSKYVNFLYLASHYEKLKGS | |
| CP1300 | KPIREQAENIIHLFTLTNLGAPAAFKYFDTTIDRKRYTSTKEV | SEQ ID NO: 81 |
| | LDATLIHQSITGLYETRIDLSQLGGDGGSGGSGGSGGSGGSG | |
| | GSGGDKKYSIGLAIGTNSVGWAVITDEYKVPSKKFKVLGNT | |
| | DRHSIKKNLIGALLFDSGETAEATRLKRTARRRYTRRKNRIC | |
| | YLQEIFSNEMAKVDDSFFHRLEESFLVEEDKKHERHPIFGNI | |
| | VDEVAYHEKYPTIYHLRKKLVDSTDKADLRLIYLALAHMIK | |
| | FRGHFLIEGDLNPDNSDVDKLFIQLVQTYNQLFEENPINASG | |
| | VDAKAILSARLSKSRRLENLIAQLPGEKKNGLFGNLIALSLG | |
| | LTPNFKSNFDLAEDAKLQLSKDTYDDDLDNLLAQIGDQYA | |
| | DLFLAAKNLSDAILLSDILRVNTEITKAPLSASMIKRYDEHH | |
| | QDLTLLKALVRQQLPEKYKEIFFDQSKNGYAGYIDGGASQE | |
| | EFYKFIKPILEKMDGTEELLVKLNREDLLRKQRTFDNGSIPH | |
| | QIHLGELHAILRRQEDFYPFLKDNREKIEKILTFRIPYYVGPL | |
| | ARGNSRFAWMTRKSEETITPWNFEEVVDKGASAQSFIERMT | |
| | NFDKNLPNEKVLPKHSLLYEYFTVYNELTKVKYVTEGMRK | |
| | PAFLSGEQKKAIVDLLFKTNRKVTVKQLKEDYFKKIECFDS | |
| | VEISGVEDRFNASLGTYHDLLKIIKDKDFLDNEENEDILEDIV | |
| | LTLTLFEDREMIEERLKTYAHLFDDKVMKQLKRRRYTGWG | |
| | RLSRKLINGIRDKQSGKTILDFLKSDGFANRNFMQLIHDDSL | |
| | TFKEDIQKAQVSGQGDSLHEHIANLAGSPAIKKGILQTVKVV | |
| | DELVKVMGRHKPENIVIEMARENQTTQKGQKNSRERMKRI | |
| | EEGIKELGSQILKEHPVENTQLQNEKLYLYYLQNGRDMYVD | |
| | QELDINRLSDYDVDHIVPQSFLKDDSIDNKVLTRSDKNRGKS | |
| | DNVPSEEVVKKMKNYWRQLLNAKLITQRKFDNLTKAERGG | |
| | LSELDKAGFIKRQLVETRQITKHVAQILDSRMNTKYDENDK | |
| | LIREVKVITLKSKLVSDFRKDFQFYKVREINNYHHAHDAYL | |
| | NAVVGTALIKKYPKLESEFVYGDYKVYDVRKMIAKSEQEIG | |
| | KATAKYFFYSNIMNFFKTEITLANGEIRKRPLIETNGETGEIV | |
| | WDKGRDFATVRKVLSMPQVNIVKKTEVQTGGFSKESILPKR | |
| | NSDKLIARKKDWDPKKYGGFDSPTVAYSVLVVAKVEKGKS | |
| | KKLKSVKELLGITIMERSSFEKNPIDFLEAKGYKEVKKDLIIK | |
| | LPKYSLFELENGRKRMLASAGELQKGNELALPSKYVNFLYL | |
| | ASHYEKLKGSPEDNEQKQLFVEQHKHYLDEIIEQISEFSKRVI | |
| | LADANLDKVLSAYNKHRD | |

[0451] The Cas9 circular permutants may be useful in the multi-flap prime editing constructs described herein. Exemplary C-terminal fragments of Cas9, based on the Cas9 of SEQ ID NO: 18, which may be rearranged to an N-terminus of Cas9, are provided below. It should be appreciated that such C-terminal fragments of Cas9 are exemplary and are not meant to be limiting. These exemplary CP-Cas9 fragments have the following sequences:

| CP name | Sequence | SEQ ID NO: |
|---|---|---|
| CP1012 C- | DYKVYDVRKMIAKSEQEIGKATAKYFFYSNIMNFFKTEITL | SEQ ID NO: 82 |
| terminal | ANGEIRKRPLIETNGETGEIVWDKGRDFATVRKVLSMPQVN | |
| fragment | IVKKTEVQTGGFSKESILPKRNSDKLIARKKDWDPKKYGGF | |
| | DSPTVAYSVLVVAKVEKGKSKKLKSVKELLGITIMERSSFEK | |
| | NPIDFLEAKGYKEVKKDLIIKLPKYSLFELENGRKRMLASAG | |
| | ELQKGNELALPSKYVNFLYLASHYEKLKGSPEDNEQKQLFV | |
| | EQHKHYLDEIIEQISEFSKRVILADANLDKVLSAYNKHRDKP | |
| | IREQAENIIHLFTLTNLGAPAAFKYFDTTIDRKRYTSTKEVLD | |
| | ATLIHQSITGLYETRIDLSQLGGD | |
| CP1028 C- | EIGKATAKYFFYSNIMNFFKTEITLANGEIRKRPLIETNGETG | SEQ ID NO: 83 |
| terminal | EIVWDKGRDFATVRKVLSMPQVNIVKKTEVQTGGFSKESIL | |
| fragment | PKRNSDKLIARKKDWDPKKYGGFDSPTVAYSVLVVAKVEK | |
| | GKSKKLKSVKELLGITIMERSSFEKNPIDFLEAKGYKEVKKD | |
| | LIIKLPKYSLFELENGRKRMLASAGELQKGNELALPSKYVNF | |
| | LYLASHYEKLKGSPEDNEQKQLFVEQHKHYLDEIIEQISEFS | |
| | KRVILADANLDKVLSAYNKHRDKPIREQAENIIHLFTLTNLG | |
| | APAAFKYFDTTIDRKRYTSTKEVLDATLIHQSITGLYETRIDL | |
| | SQLGGD | |
| CP1041 C- | NIMNFFKTEITLANGEIRKRPLIETNGETGEIVWDKGRDFAT | SEQ ID NO: 84 |
| terminal | VRKVLSMPQVNIVKKTEVQTGGFSKESILPKRNSDKLIARKK | |
| fragment | DWDPKKYGGFDSPTVAYSVLVVAKVEKGKSKKLKSVKELL | |
| | GITIMERSSFEKNPIDFLEAKGYKEVKKDLIIKLPKYSLFELE | |
| | NGRKRMLASAGELQKGNELALPSKYVNFLYLASHYEKLKG | |
| | SPEDNEQKQLFVEQHKHYLDEIIEQISEFSKRVILADANLDK | |
| | VLSAYNKHRDKPIREQAENIIHLFTLTNLGAPAAFKYFDTTI | |
| | DRKRYTSTKEVLDATLIHQSITGLYETRIDLSQLGGD | |
| CP1249 C- | PEDNEQKQLFVEQHKHYLDEIIEQISEFSKRVILADANLDKV | SEQ ID NO: 85 |
| terminal | LSAYNKHRDKPIREQAENIIHLFTLTNLGAPAAFKYFDTTIDR | |
| fragment | KRYTSTKEVLDATLIHQSITGLYETRIDLSQLGGD | |
| CP1300 C- | KPIREQAENIIHLFTLTNLGAPAAFKYFDTTIDRKRYTSTKEV | SEQ ID NO: 86 |
| terminal | LDATLIHQSITGLYETRIDLSQLGGD | |
| fragment | | |

[0452] I. Cas9 Variants with Modified PAM Specificities

[0453] The multi-flap prime editors of the present disclosure may also comprise Cas9 variants with modified PAM specificities. Some aspects of this disclosure provide Cas9 proteins that exhibit activity on a target sequence that does not comprise the canonical PAM (5′-NGG-3′, where N is A, C, G, or T) at its 3′-end. In some embodiments, the Cas9 protein exhibits activity on a target sequence comprising a 5′-NGG-3′ PAM sequence at its 3′-end. In some embodiments, the Cas9 protein exhibits activity on a target sequence comprising a 5′-NNG-3′ PAM sequence at its 3′-end. In some embodiments, the Cas9 protein exhibits activity on a target sequence comprising a 5′-NNA-3′ PAM sequence at its 3′-end. In some embodiments, the Cas9 protein exhibits activity on a target sequence comprising a 5′-NNC-3′ PAM sequence at its 3′-end. In some embodiments, the Cas9 protein exhibits activity on a target sequence comprising a 5′-NNT-3′ PAM sequence at its 3′-end. In some embodiments, the Cas9 protein exhibits activity on a target sequence comprising a 5′-NGT-3′ PAM sequence at its 3′-end. In some embodiments, the Cas9 protein exhibits activity on a target sequence comprising a 5′-NGA-3′ PAM sequence at its 3′-end. In some embodiments, the Cas9 protein exhibits activity on a target sequence comprising a 5′-NGC-3′ PAM sequence at its 3′-end. In some embodiments, the Cas9 protein exhibits activity on a target sequence comprising a 5′-NAA-3′ PAM sequence at its 3′-end. In some embodiments, the Cas9 protein exhibits activity on a target sequence comprising a 5′-NAC-3′ PAM sequence at its 3′-end. In some embodiments, the Cas9 protein exhibits activity on a target sequence comprising a 5′-NAT-3′ PAM sequence at its 3′-end. In still other embodiments, the Cas9 protein exhibits activity on a target sequence comprising a 5′-NAG-3′ PAM sequence at its 3′-end.

[0454] It should be appreciated that any of the amino acid mutations described herein, (e.g., A262T) from a first amino acid residue (e.g., A) to a second amino acid residue (e.g., T) may also include mutations from the first amino acid residue to an amino acid residue that is similar to (e.g., conserved) the second amino acid residue. For example, mutation of an amino acid with a hydrophobic side chain (e.g., alanine, valine, isoleucine, leucine, methionine, phenylalanine, tyrosine, or tryptophan) may be a mutation to a second amino acid with a different hydrophobic side chain (e.g., alanine, valine, isoleucine, leucine, methionine, phenylalanine, tyrosine, or tryptophan). For example, a mutation of an alanine to a threonine (e.g., a A262T mutation) may also be a mutation from an alanine to an amino acid that is similar in size and chemical properties to a threonine, for example, serine. As another example, mutation of an amino acid with a positively charged side chain (e.g., arginine, histidine, or lysine) may be a mutation to a second amino acid with a different positively charged side chain (e.g., arginine, histidine, or lysine). As another example, mutation of an amino acid with a polar side chain (e.g., serine, threonine, asparagine, or glutamine) may be a mutation to a second amino acid with a different polar side chain (e.g., serine, threonine, asparagine, or glutamine). Additional similar amino acid pairs include, but are not limited to, the following: phenylalanine and tyrosine; asparagine and glutamine; methionine and cysteine; aspartic acid and glutamic acid; and arginine and lysine. The skilled artisan would recognize that such conservative amino acid substitutions will likely have minor effects on protein structure and are likely to be well tolerated without compromising function. In some embodiments, any amino of the amino acid mutations provided herein from one amino acid to a threonine may be an amino acid mutation to a serine. In some embodiments, any amino of the amino acid mutations provided herein from one amino acid to an arginine may be an amino acid mutation to a lysine. In some embodiments, any amino of the amino acid mutations provided herein from one amino acid to an isoleucine, may be an amino acid mutation to an alanine, valine, methionine, or leucine. In some embodiments, any amino of the amino acid mutations provided herein from one amino acid to a lysine may be an amino acid mutation to an arginine. In some embodiments, any amino of the amino acid mutations provided herein from one amino acid to an aspartic acid may be an amino acid mutation to a glutamic acid or asparagine. In some embodiments, any amino of the amino acid mutations provided herein from one amino acid to a valine may be an amino acid mutation to an alanine, isoleucine, methionine, or leucine. In some embodiments, any amino of the amino acid mutations provided herein from one amino acid to a glycine may be an amino acid mutation to an alanine. It should be appreciated, however, that additional conserved amino acid residues would be recognized by the skilled artisan and any of the amino acid mutations to other conserved amino acid residues are also within the scope of this disclosure.

[0455] In some embodiments, the Cas9 protein comprises a combination of mutations that exhibit activity on a target sequence comprising a 5′-NAA-3′ PAM sequence at its 3′-end. In some embodiments, the combination of mutations are present in any one of the clones listed in Table 1. In some embodiments, the combination of mutations are conservative mutations of the clones listed in Table 1. In some embodiments, the Cas9 protein comprises the combination of mutations of any one of the Cas9 clones listed in Table 1.

TABLE 1
NAA PAM Clones
Mutations from wild-type SpCas9 (e.g., SEQ ID NO: 18)

D177N, K218R, D614N, D1135N, P1137S, E1219V, A1320V, A1323D, R1333K
D177N, K218R, D614N, D1135N, E1219V, Q1221H, H1264Y, A1320V, R1333K
A10T, I322V, S409I, E427G, G715C, D1135N, E1219V, Q1221H, H1264Y, A1320V, R1333K
A367T, K710E, R1114G, D1135N, P1137S, E1219V, Q1221H, H1264Y, A1320V, R1333K
A10T, I322V, S409I, E427G, R753G, D861N, D1135N, K1188R, E1219V, Q1221H, H1264H,
A1320V, R1333K
A10T, I322V, S409I, E427G, R654L, V743I, R753G, M1021T, D1135N,
D1180G, K1211R, E1219V, Q1221H, H1264Y, A1320V, R1333K
A10T, I322V, S409I, E427G, V743I, R753G, E762G, D1135N, D1180G,
K1211R, E1219V, Q1221H, H1264Y, A1320V, R1333K
A10T, I322V, S409I, E427G, R753G, D1135N, D1180G, K1211R, E1219V, Q1221H, H1264Y,
S1274R, A1320V, R1333K
A10T, I322V, S409I, E427G, A589S, R753G, D1135N, E1219V, Q1221H, H1264H, A1320V,
R1333K
A10T, I322V, S409I, E427G, R753G, E757K, G865G, D1135N, E1219V, Q1221H, H1264Y,
A1320V, R1333K
A10T, I322V, S409I, E427G, R654L, R753G, E757K, D1135N, E1219V, Q1221H,
H1264Y, A1320V, R1333K
A10T, I322V, S409I, E427G, K599R, M631A, R654L, K673E, V743I, R753G, N758H, E762G,
D1135N, D1180G, E1219V, Q1221H, Q1256R, H1264Y, A1320V, A1323D, R1333K
A10T, I322V, S409I, E427G, R654L, K673E, V743I, R753G, E762G, N869S, N1054D, R1114G,
D1135N, D1180G, E1219V, Q1221H, H1264Y, A1320V, A1323D, R1333K
A10T, I322V, S409I, E427G, R654L, L727I, V743I, R753G, E762G, R859S, N946D, F1134L,
D1135N, D1180G, E1219V, Q1221H, H1264Y, N1317T, A1320V, A1323D, R1333K
A10T, I322V, S409I, E427G, R654L, K673E, V743I, R753G, E762G, N803S, N869S, Y1016D,
G1077D, R1114G, F1134L, D1135N, D1180G, E1219V, Q1221H, H1264Y, V1290G, L1318S,
A1320V, A1323D, R1333K
A10T, I322V, S409I, E427G, R654L, K673E, V743I, R753G, E762G, N803S, N869S, Y1016D,
G1077D, R1114G, F1134L, D1135N, K1151E, D1180G, E1219V, Q1221H, H1264Y, V1290G,
L1318S, A1320V, R1333K
A10T, I322V, S409I, E427G, R654L, K673E, V743I, R753G, E762G, N803S, N869S, Y1016D,
G1077D, R1114G, F1134L, D1135N, D1180G, E1219V, Q1221H, H1264Y, V1290G, L1318S,
A1320V, A1323D, R1333K
A10T, I322V, S409I, E427G, R654L, K673E, F693L, V743I, R753G, E762G, N803S, N869S,
L921P, Y1016D, G1077D, F1080S, R1114G, D1135N, D1180G, E1219V, Q1221H,
H1264Y, L1318S, A1320V, A1323D, R1333K
A10T, I322V, S409I, E427G, E630K, R654L, K673E, V743I, R753G, E762G, Q768H, N803S,
N869S, Y1016D, G1077D, R1114G, F1134L, D1135N, D1180G, E1219V, Q1221H, H1264Y,
L1318S, A1320V, R1333K
A10T, I322V, S409I, E427G, R654L, K673E, F693L, V743I, R753G, E762G,
Q768H, N803S, N869S, Y1016D, G1077D, R1114G, F1134L, D1135N, D1180G, E1219V,
Q1221H, G1223S, H1264Y, L1318S, A1320V, R1333K
A10T, I322V, S409I, E427G, R654L, K673E, F693L, V743I, R753G, E762G, N803S,
N869S, L921P, Y1016D, G1077D, F1801S, R1114G, D1135N, D1180G, E1219V,
Q1221H, H1264Y, L1318S, A1320V, A1323D, R1333K
A10T, I322V, S409I, E427G, R654L, V743I, R753G, M1021T, D1135N, D1180G,
K1211R, E1219V, Q1221H, H1264Y, A1320V, R1333K
A10T, I322V, S409I, E427G, R654L, K673E, V743I, R753G, E762G, M673I, N803S, N869S,
G1077D, R1114G, D1135N, V1139A, D1180G, E1219V, Q1221H, A1320V, R1333K
A10T, I322V, S409I, E427G, R654L, K673E, V743I, R753G, E762G, N803S, N869S, R1114G,
D1135N, E1219V, Q1221H, A1320V, R1333K

[0456] In some embodiments, the Cas9 protein comprises an amino acid sequence that is at least 80% identical to the amino acid sequence of a Cas9 protein as provided by any one of the variants of Table 1. In some embodiments, the Cas9 protein comprises an amino acid sequence that is at least 85%, at least 90%, at least 92%, at least 95%, at least 96%, at least 97%, at least 98%, at least 99%, or at least 99.5% identical to the amino acid sequence of a Cas9 protein as provided by any one of the variants of Table 1.

[0457] In some embodiments, the Cas9 protein exhibits an increased activity on a target sequence that does not comprise the canonical PAM (5′-NGG-3′) at its 3′ end as compared to Streptococcus pyogenes Cas9 as provided by SEQ ID NO: 18. In some embodiments, the Cas9 protein exhibits an activity on a target sequence having a 3′ end that is not directly adjacent to the canonical PAM sequence (5′-NGG-3′) that is at least 5-fold increased as compared to the activity of Streptococcus pyogenes Cas9 as provided by SEQ ID NO: 18 on the same target sequence. In some embodiments, the Cas9 protein exhibits an activity on a target sequence that is not directly adjacent to the canonical PAM sequence (5′-NGG-3′) that is at least 10-fold, at least 50-fold, at least 100-fold, at least 500-fold, at least 1,000-fold, at least 5,000-fold, at least 10,000-fold, at least 50,000-fold, at least 100,000-fold, at least 500,000-fold, or at least 1,000,000-fold increased as compared to the activity of Streptococcus pyogenes as provided by SEQ ID NO: 18 on the same target sequence. In some embodiments, the 3′ end of the target sequence is directly adjacent to an AAA, GAA, CAA, or TAA sequence. In some embodiments, the Cas9 protein comprises a combination of mutations that exhibit activity on a target sequence comprising a 5′-NAC-3′ PAM sequence at its 3′-end. In some embodiments, the combination of mutations are present in any one of the clones listed in Table 2. In some embodiments, the combination of mutations are conservative mutations of the clones listed in Table 2. In some embodiments, the Cas9 protein comprises the combination of mutations of any one of the Cas9 clones listed in Table 2.

TABLE 2
NAC PAM Clones
MUTATIONS FROM WILD-TYPE SPCAS9 (E.G., SEQ ID NO: 18)

T472I, R753G, K890E, D1332N, R1335Q, T1337N
I1057S, D1135N, P1301S, R1335Q, T1337N
T472I, R753G, D1332N, R1335Q, T1337N
D1135N, E1219V, D1332N, R1335Q, T1337N
T472I, R753G, K890E, D1332N, R1335Q, T1337N
I1057S, D1135N, P1301S, R1335Q, T1337N
T472I, R753G, D1332N, R1335Q, T1337N
T472I, R753G, Q771H, D1332N, R1335Q, T1337N
E627K, T638P, K652T, R753G, N803S, K959N, R1114G, D1135N, E1219V, D1332N, R1335Q,
T1337N
E627K, T638P, K652T, R753G, N803S, K959N, R1114G, D1135N, K1156E, E1219V, D1332N,
R1335Q, T1337N
E627K, T638P, V647I, R753G, N803S, K959N, G1030R, I1055E, R1114G, D1135N, E1219V,
D1332N, R1335Q, T1337N
E627K, E630G, T638P, V647A, G687R, N767D, N803S, K959N, R1114G, D1135N,
E1219V, D1332G, R1335Q, T1337N
E627K, T638P, R753G, N803S, K959N, R1114G, D1135N, E1219V, N1266H, D1332N, R1335Q,
T1337N
E627K, T638P, R753G, N803S, K959N, I1057T, R1114G, D1135N, E1219V, D1332N, R1335Q,
T1337N
E627K, T638P, R753G, N803S, K959N, R1114G, D1135N, E1219V, D1332N, R1335Q, T1337N
E627K, M631I, T638P, R753G, N803S, K959N, Y1036H, R1114G, D1135N, E1219V, D1251G,
D1332G, R1335Q, T1337N
E627K, T638P, R753G, N803S, V875I, K959N, Y1016C, R1114G, D1135N, E1219V, D1251G,
D1332G, R1335Q, T1337N, I1348V
K608R, E627K, T638P, V647I, R654L, R753G, N803S, T804A, K848N, V922A, K959N, R1114G,
D1135N, E1219V, D1332N, R1335Q, T1337N
K608R, E627K, T638P, V647I, R753G, N803S, V922A, K959N, K1014N, V1015A,
R1114G, D1135N, K1156N, E1219V, N1252D, D1332N, R1335Q, T1337N
K608R, E627K, R629G, T638P, V647I, A711T, R753G, K775R, K789E, N803S, K959N, V1015A,
Y1036H, R1114G, D1135N, E1219V, N1286H, D1332N, R1335Q, T1337N
K608R, E627K, T638P, V647I, T740A, R753G, N803S, K948E, K959N, Y1016S,
R1114G, D1135N, E1219V, N1286H, D1332N, R1335Q, T1337N
K608R, E627K, T638P, V647I, T740A, N803S, K948E, K959N, Y1016S, R1114G,
D1135N, E1219V, N1286H, D1332N, R1335Q, T1337N
I670S, K608R, E627K, E630G, T638P, V647I, R653K, R753G, I795L, K797N, N803S, K866R,
K890N, K959N, Y1016C, R1114G, D1135N, E1219V, D1332N, R1335Q, T1337N
K608R, E627K, T638P, V647I, T740A, G752R, R753G, K797N, N803S, K948E, K959N, V1015A,
Y1016S, R1114G, D1135N, E1219V, N1266H, D1332N, R1335Q, T1337N
I570T, A589V, K608R, E627K, T638P, V647I, R654L, Q716R, R753G, N803S, K948E, K959N,
Y1016S, R1114G, D1135N, E1207G, E1219V, N1234D, D1332N, R1335Q, T1337N
K608R, E627K, R629G, T638R V647I, R654L, Q740R, R753G, N803S, K959N, N990S, T995S,
V1015A, Y1036D, R1114G, D1135N, E1207G, E1219V, N1234D, N1266H, D1332N, R1335Q,
T1337N
I562F, V565D, I570T, K608R, L625S, E627K, T638P, V647I, R654I, G752R, R753G, N803S,
N808D, K959N, M1021L, R1114G, D1135N, N1177S, N1234D, D1332N, R1335Q, T1337N
I562F, I570T, K608R, E627K, T638P, V647I, R753G, E790A, N803S, K959N, V1015A, Y1036H,
R1114G, D1135N, D1180E, A1184T, E1219V, D1332N, R1335Q, T1337N
I570T, K608R, E627K, T638P, V647I, R654H, R753G, E790A, N803S, K959N, V1015A, R1114G,
D1127A, D1135N, E1219V, D1332N, R1335Q, T1337N
I570T, K608R, L625S, E627K, T638P, V647I, R654I, T703P, R753G, N803S, N808D, K959N,
M1021L, R1114G, D1135N, E1219V, D1332N, R1335Q, T1337N
I570S, K608R, E627K, E630G, T638P, V647I, R653K, R753G, I795L, N803S, K866R, K890N,
K959N, Y1016C, R1114G, D1135N, E1219V, D1332N, R1335Q, T1337N
I570T, K608R, E627K, T638P, V647I, R654H, R753G, E790A, N803S, K959N, V1016A, R1114G,
D1135N, E1219V, K1246E, D1332N, R1335Q, T1337N
K608R, E627K, T638P, V647I, R654L, K673E, R753G, E790A, N803S, K948E, K959N, R1114G,
D1127G, D1135N, D1180E, E1219V, N1286H, D1332N, R1335Q, T1337N
K608R, L625S, E627K, T638P, V647I, R654I, I670T, R753G, N803S, N808D, K959N, M1021L,
R1114G, D1135N, E1219V, N1286H, D1332N, R1335Q, T1337N
E627K, M631V, T638P, V647I, K710E, R753G, N803S, N808D, K948E, M1021L,
R1114G, D1135N, E1219V, D1332N, R1335Q, T1337N, S1338T, H1349R

[0458] In some embodiments, the Cas9 protein comprises an amino acid sequence that is at least 80% identical to the amino acid sequence of a Cas9 protein as provided by any one of the variants of Table 2. In some embodiments, the Cas9 protein comprises an amino acid sequence that is at least 85%, at least 90%, at least 92%, at least 95%, at least 96%, at least 97%, at least 98%, at least 99%, or at least 99.5% identical to the amino acid sequence of a Cas9 protein as provided by any one of the variants of Table 2.

[0459] In some embodiments, the Cas9 protein exhibits an increased activity on a target sequence that does not comprise the canonical PAM (5′-NGG-3′) at its 3′ end as compared to Streptococcus pyogenes Cas9 as provided by SEQ ID NO: 18. In some embodiments, the Cas9 protein exhibits an activity on a target sequence having a 3′ end that is not directly adjacent to the canonical PAM sequence (5′-NGG-3′) that is at least 5-fold increased as compared to the activity of Streptococcus pyogenes Cas9 as provided by SEQ ID NO: 18 on the same target sequence. In some embodiments, the Cas9 protein exhibits an activity on a target sequence that is not directly adjacent to the canonical PAM sequence (5′-NGG-3′) that is at least 10-fold, at least 50-fold, at least 100-fold, at least 500-fold, at least 1,000-fold, at least 5,000-fold, at least 10,000-fold, at least 50,000-fold, at least 100,000-fold, at least 500,000-fold, or at least 1,000,000-fold increased as compared to the activity of Streptococcus pyogenes as provided by SEQ ID NO: 18 on the same target sequence. In some embodiments, the 3′ end of the target sequence is directly adjacent to an AAC, GAC, CAC, or TAC sequence.

[0460] In some embodiments, the Cas9 protein comprises a combination of mutations that exhibit activity on a target sequence comprising a 5′-NAT-3′ PAM sequence at its 3′-end. In some embodiments, the combination of mutations are present in any one of the clones listed in Table 3. In some embodiments, the combination of mutations are conservative mutations of the clones listed in Table 3. In some embodiments, the Cas9 protein comprises the combination of mutations of any one of the Cas9 clones listed in Table 3.

TABLE 3
NAT PAM Clones
MUTATIONS FROM WILD-TYPE SPCAS9 (E.G., SEQ ID NO: 18)

K961E, H985Y, D1135N, K1191N, E1219V, Q1221H, A1320A, P1321S, R1335L
D1135N, G1218S, E1219V, Q1221H, P1249S, P1321S, D1322G, R1335L
V743I, R753G, E790A, D1135N, G1218S, E1219V, Q1221H, A1227V, P1249S, N1286K, A1293T,
P1321S, D1322G, R1335L, T1339I
F575S, M631L, R654L, V748I, V743I, R753G, D853E, V922A, R1114G D1135N, G1218S,
E1219V, Q1221H, A1227V, P1249S, N1286K, A1293T, P1321S, D1322G, R1335L, T1339I
F575S, M631L, R654L, R664K, R753G, D853E, V922A, R1114G D1135N, D1180G, G1218S,
E1219V, Q1221H, P1249S, N1286K, P1321S, D1322G, R1335L
M631L, R654L, R753G, K797E, D853E, V922A, D1012A, R1114G D1135N, G1218S, E1219V,
Q1221H, P1249S, N1317K, P1321S, D1322G, R1335L
F575S, M631L, R654L, R664K, R753G, D853E, V922A, R1114G, Y1131C, D1135N, D1180G,
G1218S, E1219V, Q1221H, P1249S, P1321S, D1322G, R1335L
F575S, M631L, R654L, R664K, R753G, D853E, V922A, R1114G, Y1131C, D1135N, D1180G,
G1218S, E1219V, Q1221H, P1249S, P1321S, D1322G, R1335L
F575S, D596Y, M631L, R654L, R664K, R753G, D853E, V922A, R1114G, Y1131C,
D1135N, D1180G, G1218S, E1219V, Q1221H, P1249S, Q1256R, P1321S, D1322G, R1335L
F575S, M631L, R654L, R664K, K710E, V750A, R753G, D853E, V922A, R1114G,
Y1131C, D1135N, D1180G, G1218S, E1219V, Q1221H, P1249S, P1321S, D1322G, R1335L
F575S, M631L, K649R, R654L, R664K, R753G, D853E, V922A, R1114G, Y1131C,
D1135N, K1156E, D1180G, G1218S, E1219V, Q1221H, P1249S, P1321S, D1322G, R1335L
F575S, M631L, R654L, R664K, R753G, D853E, V922A, R1114G, Y1131C, D1135N, D1180G,
G1218S, E1219V, Q1221H, P1249S, P1321S, D1322G, R1335L
F575S, M631L, R654L, R664K, R753G, D853E, V922A, I1057G, R1114G, Y1131C, D1135N,
D1180G, G1218S, E1219V, Q1221H, P1249S, N1308D, P1321S, D1322G, R1335L
M631L, R654L, R753G, D853E, V922A, R1114G, Y1131C, D1135N, E1150V, D1180G, G1218S,
E1219V, Q1221H, P1249S, P1321S, D1332G, R1335L
M631L, R654L, R664K, R753G, D853E, 11057V, Y1131C, D1135N, D1180G, G1218S, E1219V,
Q1221H, P1249S, P1321S, D1332G, R1335L
M631L, R654L, R664K, R753G, 11057V, R1114G, Y1131C, D1135N, D1180G, G1218S, E1219V,
Q1221H, P1249S, P1321S, D1332G, R1335L

[0461] The above description of various napDNAbps which can be used in connection with the presently disclosed multi-flap prime editors is not meant to be limiting in any way. The multi-flap prime editors may comprise the canonical SpCas9, or any ortholog Cas9 protein, or any variant Cas9 protein—including any naturally occurring variant, mutant, or otherwise engineered version of Cas9—that is known or which can be made or evolved through a directed evolutionary or otherwise mutagenic process. In various embodiments, the Cas9 or Cas9 varants have a nickase activity, i.e., only cleave of strand of the target DNA sequence. In other embodiments, the Cas9 or Cas9 variants have inactive nucleases, i.e., are “dead” Cas9 proteins. Other variant Cas9 proteins that may be used are those having a smaller molecular weight than the canonical SpCas9 (e.g., for easier delivery) or having modified or rearranged primary amino acid structure (e.g., the circular permutant formats). The multi-flap prime editors described herein may also comprise Cas9 equivalents, including Cas12a/Cpf1 and Cas12b proteins which are the result of convergent evolution. The napDNAbps used herein (e.g., SpCas9, Cas9 variant, or Cas9 equivalents) may also contain various modifications that alter/enhance their PAM specifities. Lastly, the application contemplates any Cas9, Cas9 variant, or Cas9 equivalent which has at least 70%, at least 75%, at least 80%, at least 85%, at least 90%, at least 91%, at least 92%, at least 93%, at least 94%, at least 95%, at least 96%, at least 97%, at least 98%, at least 99%, or at least 99.9% sequence identity to a reference Cas9 sequence, such as a references SpCas9 canonical sequences or a reference Cas9 equivalent (e.g., Cas12a/Cpf1).

[0462] In a particular embodiment, the Cas9 variant having expanded PAM capabilities is SpCas9 (H840A) VRQR (SEQ ID NO: 87), which has the following amino acid sequence (with the V, R, Q, R substitutions relative to the SpCas9 (H840A) of SEQ ID NO: 51 being show in bold underline. In addition, the methionine residue in SpCas9 (H840) was removed for SpCas9 (H840A) VRQR):

(SEQ ID NO: 87)
DKKYSIGLDIGTNSVGWAVITDEYKVPSKKFKVLGNTDRHSIKKNLIGALLFDSGETAEATRLK
RTARRRYTRRKNRICYLQEIFSNEMAKVDDSFFHRLEESFLVEEDKKHERHPIFGNIVDEVAYHE
KYPTIYHLRKKLVDSTDKADLRLIYLALAHMIKFRGHFLIEGDLNPDNSDVDKLFIQLVQTYNQ
LFEENPINASGVDAKAILSARLSKSRRLENLIAQLPGEKKNGLFGNLIALSLGLTPNFKSNFDLA
EDAKLQLSKDTYDDDLDNLLAQIGDQYADLFLAAKNLSDAILLSDILRVNTEITKAPLSASMIK
RYDEHHQDLTLLKALVRQQLPEKYKEIFFDQSKNGYAGYIDGGASQEEFYKFIKPILEKMDGTE
ELLVKLNREDLLRKQRTFDNGSIPHQIHLGELHAILRRQEDFYPFLKDNREKIEKILTFRIPYYVG
PLARGNSRFAWMTRKSEETITPWNFEEVVDKGASAQSFIERMTNFDKNLPNEKVLPKHSLLYE
YFTVYNELTKVKYVTEGMRKPAFLSGEQKKAIVDLLFKTNRKVTVKQLKEDYFKKIECFDSVE
ISGVEDRFNASLGTYHDLLKIIKDKDFLDNEENEDILEDIVLTLTLFEDREMIEERLKTYAHLFDD
KVMKQLKRRRYTGWGRLSRKLINGIRDKQSGKTILDFLKSDGFANRNFMQLIHDDSLTFKEDI
QKAQVSGQGDSLHEHIANLAGSPAIKKGILQTVKVVDELVKVMGRHKPENIVIEMARENQTTQ
KGQKNSRERMKRIEEGIKELGSQILKEHPVENTQLQNEKLYLYYLQNGRDMYVDQELDINRLS
DYDVDAIVPQSFLKDDSIDNKVLTRSDKNRGKSDNVPSEEVVKKMKNYWRQLLNAKLITQRK
FDNLTKAERGGLSELDKAGFIKRQLVETRQITKHVAQILDSRMNTKYDENDKLIREVKVITLKS
KLVSDFRKDFQFYKVREINNYHHAHDAYLNAVVGTALIKKYPKLESEFVYGDYKVYDVRKMI
AKSEQEIGKATAKYFFYSNIMNFFKTEITLANGEIRKRPLIETNGETGEIVWDKGRDFATVRKVL
SMPQVNIVKKTEVQTGGFSKESILPKRNSDKLIARKKDWDPKKYGGFVSPTVAYSVLVVAKVE
KGKSKKLKSVKELLGITIMERSSFEKNPIDFLEAKGYKEVKKDLIIKLPKYSLFELENGRKRML
ASARELQKGNELALPSKYVNFLYLASHYEKLKGSPEDNEQKQLFVEQHKHYLDEIIEQISEFSK
RVILADANLDKVLSAYNKHRDKPIREQAENIIHLFTLTNLGAPAAFKYFDTTIDRKQYRSTKEV
LDATLIHQSITGLYETRIDLSQLGGD

[0463] In another particular embodiment, the Cas9 variant having expanded PAM capabilities is SpCas9 (H840A) VRER, which has the following amino acid sequence (with the V, R, E, R substitutions relative to the SpCas9 (H840A) of SEQ ID NO: 51 being shown in bold underline. In addition, the methionine residue in SpCas9 (H840) was removed for SpCas9 (H840A) VRER):

(SEQ ID NO: 88)
DKKYSIGLDIGTNSVGWAVITDEYKVPSKKFKVLGNTDRHSIKKNLIGALLFDSGETAEATRLK
RTARRRYTRRKNRICYLQEIFSNEMAKVDDSFFHRLEESFLVEEDKKHERHPIFGNIVDEVAYHE
KYPTIYHLRKKLVDSTDKADLRLIYLALAHMIKFRGHFLIEGDLNPDNSDVDKLFIQLVQTYNQ
LFEENPINASGVDAKAILSARLSKSRRLENLIAQLPGEKKNGLFGNLIALSLGLTPNFKSNFDLA
EDAKLQLSKDTYDDDLDNLLAQIGDQYADLFLAAKNLSDAILLSDILRVNTEITKAPLSASMIK
RYDEHHQDLTLLKALVRQQLPEKYKEIFFDQSKNGYAGYIDGGASQEEFYKFIKPILEKMDGTE
ELLVKLNREDLLRKQRTFDNGSIPHQIHLGELHAILRRQEDFYPFLKDNREKIEKILTFRIPYYVG
PLARGNSRFAWMTRKSEETITPWNFEEVVDKGASAQSFIERMTNFDKNLPNEKVLPKHSLLYE
YFTVYNELTKVKYVTEGMRKPAFLSGEQKKAIVDLLFKTNRKVTVKQLKEDYFKKIECFDSVE
ISGVEDRFNASLGTYHDLLKIIKDKDFLDNEENEDILEDIVLTLTLFEDREMIEERLKTYAHLFDD
KVMKQLKRRRYTGWGRLSRKLINGIRDKQSGKTILDFLKSDGFANRNFMQLIHDDSLTFKEDI
QKAQVSGQGDSLHEHIANLAGSPAIKKGILQTVKVVDELVKVMGRHKPENIVIEMARENQTTQ
KGQKNSRERMKRIEEGIKELGSQILKEHPVENTQLQNEKLYLYYLQNGRDMYVDQELDINRLS
DYDVDAIVPQSFLKDDSIDNKVLTRSDKNRGKSDNVPSEEVVKKMKNYWRQLLNAKLITQRK
FDNLTKAERGGLSELDKAGFIKRQLVETRQITKHVAQILDSRMNTKYDENDKLIREVKVITLKS
KLVSDFRKDFQFYKVREINNYHHAHDAYLNAVVGTALIKKYPKLESEFVYGDYKVYDVRKMI
AKSEQEIGKATAKYFFYSNIMNFFKTEITLANGEIRKRPLIETNGETGEIVWDKGRDFATVRKVL
SMPQVNIVKKTEVQTGGFSKESILPKRNSDKLIARKKDWDPKKYGGFVSPTVAYSVLVVAKVE
KGKSKKLKSVKELLGITIMERSSFEKNPIDFLEAKGYKEVKKDLIIKLPKYSLFELENGRKRML
ASARELQKGNELALPSKYVNFLYLASHYEKLKGSPEDNEQKQLFVEQHKHYLDEIIEQISEFSK
RVILADANLDKVLSAYNKHRDKPIREQAENIIHLFTLTNLGAPAAFKYFDTTIDRKEYRSTKEV
LDATLIHQSITGLYETRIDLSQLGGD

[0464] In some embodiments, the napDNAbp that functions with a non-canonical PAM sequence is an Argonaute protein. One example of such a nucleic acid programmable DNA binding protein is an Argonaute protein from Natronobacterium gregoryi (NgAgo). NgAgo is a ssDNA-guided endonuclease. NgAgo binds 5′ phosphorylated ssDNA of —24 nucleotides (gDNA) to guide it to its target site and will make DNA double-strand breaks at the gDNA site. In contrast to Cas9, the NgAgo—gDNA system does not require a protospacer-adjacent motif (PAM). Using a nuclease inactive NgAgo (dNgAgo) can greatly expand the bases that may be targeted. The characterization and use of NgAgo have been described in Gao et al., Nat Biotechnol., 2016 Jul; 34(7):768-73. PubMed PMID: 27136078; Swarts et al., Nature. 507(7491) (2014):258-61; and Swarts et al., Nucleic Acids Res. 43(10) (2015):5120-9, each of which is incorporated herein by reference.

[0465] In some embodiments, the napDNAbp is a prokaryotic homolog of an Argonaute protein. Prokaryotic homologs of Argonaute proteins are known and have been described, for example, in Makarova K., et al., “Prokaryotic homologs of Argonaute proteins are predicted to function as key components of a novel system of defense against mobile genetic elements”, Biol Direct. 2009 Aug 25; 4:29. doi: 10.1186/1745-6150-4-29, the entire contents of which is hereby incorporated by reference. In some embodiments, the napDNAbp is a Marinitoga piezophila Argunaute (MpAgo) protein. The CRISPR-associated Marinitoga piezophila Argunaute (MpAgo) protein cleaves single-stranded target sequences using 5′-phosphorylated guides. The 5′ guides are used by all known Argonautes. The crystal structure of an MpAgo-RNA complex shows a guide strand binding site comprising residues that block 5′ phosphate interactions. This data suggests the evolution of an Argonaute subclass with noncanonical specificity for a 5′-hydroxylated guide. See, e.g., Kaya et al., “A bacterial Argonaute with noncanonical guide RNA specificity”, Proc Natl Acad Sci USA. 2016 Apr 12; 113(15):4057-62, the entire contents of which are hereby incorporated by reference). It should be appreciated that other argonaute proteins may be used, and are within the scope of this disclosure.

[0466] Some aspects of the disclosure provide Cas9 domains that have different PAM specificities. Typically, Cas9 proteins, such as Cas9 from S. pyogenes (spCas9), require a canonical NGG PAM sequence to bind a particular nucleic acid region. This may limit the ability to edit desired bases within a genome. In some embodiments, the base editing fusion proteins provided herein may need to be placed at a precise location, for example where a target base is placed within a 4 base region (e.g., a “editing window”), which is approximately 15 bases upstream of the PAM. See Komor, A. C., et al., “Programmable editing of a target base in genomic DNA without double-stranded DNA cleavage” Nature 533, 420-424 (2016), the entire contents of which are hereby incorporated by reference. Accordingly, in some embodiments, any of the fusion proteins provided herein may contain a Cas9 domain that is capable of binding a nucleotide sequence that does not contain a canonical (e.g., NGG) PAM sequence. Cas9 domains that bind to non-canonical PAM sequences have been described in the art and would be apparent to the skilled artisan. For example, Cas9 domains that bind non-canonical PAM sequences have been described in Kleinstiver, B. P., et al., “Engineered CRISPR-Cas9 nucleases with altered PAM specificities” Nature 523, 481-485 (2015); and Kleinstiver, B. P., et al., “Broadening the targeting range of Staphylococcus aureus CRISPR-Cas9 by modifying PAM recognition” Nature Biotechnology 33, 1293-1298 (2015); the entire contents of each are hereby incorporated by reference.

[0467] For example, a napDNAbp domain with altered PAM specificity, such as a domain with at least 80%, at least 85%, at least 90%, at least 95%, or at least 99% sequence identity with wild type Francisella novicida Cpf1 (D917, E1006, and D1255) (SEQ ID NO: 74), which has the following amino acid sequence:

(SEQ ID NO: 74)
MSIYQEFVNKYSLSKTLRFELIPQGKTLENIKARGLILDDEKRAKDYKKAKQIIDKYHQFFIEEI
LSSVCISEDLLQNYSDVYFKLKKSDDDNLQKDFKSAKDTIKKQISEYIKDSEKFKNLFNQNLID
AKKGQESDLILWLKQSKDNGIELFKANSDITDIDEALEIIKSFKGWTTYFKGFHENRKNVYSSN
DIPTSIIYRIVDDNLPKFLENKAKYESLKDKAPEAINYEQIKKDLAEELTFDIDYKTSEVNQRVFS
LDEVFEIANFNNYLNQSGITKFNTIIGGKFVNGENTKRKGINEYINLYSQQINDKTLKKYKMSV
LFKQILSDTESKSFVIDKLEDDSDVVTTMQSFYEQIAAFKTVEEKSIKETLSLLFDDLKAQKLDL
SKIYFKNDKSLTDLSQQVFDDYSVIGTAVLEYITQQIAPKNLDNPSKKEQELIAKKTEKAKYLSL
ETIKLALEEFNKHRDIDKQCRFEEILANFAAIPMIFDEIAQNKDNLAQISIKYQNQGKKDLLQAS
AEDDVKAIKDLLDQTNNLLHKLKIFHISQSEDKANILDKDEHFYLVFEECYFELANIVPLYNKIR
NYITQKPYSDEKFKLNFENSTLANGWDKNKEPDNTAILFIKDDKYYLGVMNKKNNKIFDDKAI
KENKGEGYKKIVYKLLPGANKMLPKVFFSAKSIKFYNPSEDILRIRNHSTHTKNGSPQKGYEKF
EFNIEDCRKFIDFYKQSISKHPEWKDFGFRFSDTQRYNSIDEFYREVENQGYKLTFENISESYIDS
VVNQGKLYLFQIYNKDFSAYSKGRPNLHTLYWKALFDERNLQDVVYKLNGEAELFYRKQSIP
KKITHPAKEAIANKNKDNPKKESVFEYDLIKDKRFTEDKFFFHCPITINFKSSGANKFNDEINLL
LKEKANDVHILSIDRGERHLAYYTLVDGKGNIIKQDTFNIIGNDRMKTNYHDKLAAIEKDRDS
ARKDWKKINNIKEMKEGYLSQVVHEIAKLVIEYNAIVVFEDLNFGFKRGRFKVEKQVYQKLE
KMLIEKLNYLVFKDNEFDKTGGVLRAYQLTAPFETFKKMGKQTGIIYYVPAGFTSKICPVTGFV
NQLYPKYESVSKSQEFFSKFDKICYNLDKGYFEFSFDYKNFGDKAAKGKWTIASFGSRLINFRN
SDKNHNWDTREVYPTKELEKLLKDYSIEYGHGECIKAAICGESDKKFFAKLTSVLNTILQMRN
SKTGTELDYLISPVADVNGNFFDSRQAPKNMPQDADANGAYHIGLKGLMLLGRIKNNQEGKK
LNLVIKNEEYFEFVQNRNN

[0468] An additional napDNAbp domain with altered PAM specificity, such as a domain having at least 80%, at least 85%, at least 90%, at least 95%, or at least 99% sequence identity with wild type Geobacillus thermodenitrificans Cas9 (SEQ ID NO: 75), which has the following amino acid sequence:

(SEQ ID NO: 75)
MKYKIGLDIGITSIGWAVINLDIPRIEDLGVRIFDRAENPKTGESLALPRRLARSARRRLRRRKHR
LERIRRLFVREGILTKEELNKLFEKKHEIDVWQLRVEALDRKLNNDELARILLHLAKRRGFRSN
RKSERTNKENSTMLKHIEENQSILSSYRTVAEMVVKDPKFSLHKRNKEDNYTNTVARDDLEREI
KLIFAKQREYGNIVCTEAFEHEYISIWASQRPFASKDDIEKKVGFCTFEPKEKRAPKATYTFQSF
TVWEHINKLRLVSPGGIRALTDDERRLIYKQAFHKNKITFHDVRTLLNLPDDTRFKGLLYDRNT
TLKENEKVRFLELGAYHKIRKAIDSVYGKGAAKSFRPIDFDTFGYALTMFKDDTDIRSYLRNEY
EQNGKRMENLADKVYDEELIEELLNLSFSKFGHLSLKALRNILPYMEQGEVYSTACERAGYTF
TGPKKKQKTVLLPNIPPIANPVVMRALTQARKVVNAIIKKYGSPVSIHIELARELSQSFDERRK
MQKEQEGNRKKNETAIRQLVEYGLTLNPTGLDIVKFKLWSEQNGKCAYSLQPIEIERLLEPGYT
EVDHVIPYSRSLDDSYTNKVLVLTKENREKGNRTPAEYLGLGSERWQQFETFVLTNKQFSKKK
RDRLLRLHYDENEENEFKNRNLNDTRYISRFLANFIREHLKFADSDDKQKVYTVNGRITAHLRS
RWNFNKNREESNLHHAVDAAIVACTTPSDIARVTAFYQRREQNKELSKKTDPQFPQPWPHFAD
ELQARLSKNPKESIKALNLGNYDNEKLESLQPVFVSRMPKRSITGAAHQETLRRYIGIDERSGKI
QTVVKKKLSEIQLDKTGHFPMYGKESDPRTYEAIRQRLLEHNNDPKKAFQEPLYKPKKNGELG
PIIRTIKIIDTTNQVIPLNDGKTVAYNSNIVRVDVFEKDGKYYCVPIYTIDMMKGILPNKAIEPNK
PYSEWKEMTEDYTFRFSLYPNDLIRIEFPREKTIKTAVGEEIKIKDLFAYYQTIDSSNGGLSLVSH
DNNFSLRSIGSRTLKRFEKYQVDVLGNIYKVRGEKRVGVASSSHSKAGETIRPL

[0469] In some embodiments, the nucleic acid programmable DNA binding protein (napDNAbp) is a nucleic acid programmable DNA binding protein that does not require a canonical (NGG) PAM sequence. In some embodiments, the napDNAbp is an argonaute protein. One example of such a nucleic acid programmable DNA binding protein is an Argonaute protein from Natronobacterium gregoryi (NgAgo). NgAgo is a ssDNA-guided endonuclease. NgAgo binds 5′ phosphorylated ssDNA of —24 nucleotides (gDNA) to guide it to its target site and will make DNA double-strand breaks at the gDNA site. In contrast to Cas9, the NgAgo—gDNA system does not require a protospacer-adjacent motif (PAM). Using a nuclease inactive NgAgo (dNgAgo) can greatly expand the bases that may be targeted. The characterization and use of NgAgo have been described in Gao et al., Nat Biotechnol., 34(7): 768-73 (2016), PubMed PMID: 27136078; Swarts et al., Nature, 507(7491): 258-61 (2014); and Swarts et al., Nucleic Acids Res. 43(10) (2015): 5120-9, each of which is incorporated herein by reference. The sequence of Natronobacterium gregoryi Argonaute is provided in SEQ ID NO: 76.

[0470] The disclosed fusion proteins may comprise a napDNAbp domain having at least 80%, at least 85%, at least 90%, at least 95%, or at least 99% sequence identity with wild type Natronobacterium gregoryi Argonaute (SEQ ID NO: 76), which has the following amino acid sequence:

(SEQ ID NO: 76)
MTVIDLDSTTTADELTSGHTYDISVTLTGVYDNTDEQHPRMSLAFEQDNGERRYITLWKNTTP
KDVFTYDYATGSTYIFTNIDYEVKDGYENLTATYQTTVENATAQEVGTTDEDETFAGGEPLDHH
LDDALNETPDDAETESDSGHVMTSFASRDQLPEWTLHTYTLTATDGAKTDTEYARRTLAYTVR
QELYTDHDAAPVATDGLMLLTPEPLGETPLDLDCGVRVEADETRTLDYTTAKDRLLARELVEE
GLKRSLWDDYLVRGIDEVLSKEPVLTCDEFDLHERYDLSVEVGHSGRAYLHINFRHRFVPKLTL
ADIDDDNIYPGLRVKTTYRPRRGHIVWGLRDECATDSLNTLGNQSVVAYHRNNQTPINTDLLD
AIEAADRRVVETRRQGHGDDAVSFPQELLAVEPNTHQIKQFASDGFHQQARSKTRLSASRCSE
KAQAFAERLDPVRLNGSTVEFSSEFFTGNNEQQLRLLYENGESVLTFRDGARGAHPDETFSKGI
VNPPESFEVAVVLPEQQADTCKAQWDTMADLLNQAGAPPTRSETVQYDAFSSPESISLNVAGA
IDPSEVDAAFVVLPPDQEGFADLASPTETYDELKKALANMGIYSQMAYFDRFRDAKIFYTRNV
ALGLLAAAGGVAFTTEHAMPGDADMFIGIDVSRSYPEDGASGQINIAATATAVYKDGTILGHSS
TRPQLGEKLQSTDVRDIMKNAILGYQQVTGESPTHIVIHRDGFMNEDLDPATEFLNEQGVEYDI
VEIRKQPQTRLLAVSDVQYDTPVKSIAAINQNEPRATVATFGAPEYLATRDGGGLPRPIQIERVA
GETDIETLTRQVYLLSQSHIQVHNSTARLPITTAYADQASTHATKGYLVQTGAFESNVGFL

[0471] In addition, any available methods may be utilized to obtain or construct a variant or mutant Cas9 protein. The term “mutation,” as used herein, refers to a substitution of a residue within a sequence, e.g., a nucleic acid or amino acid sequence, with another residue, or a deletion or insertion of one or more residues within a sequence. Mutations are typically described herein by identifying the original residue followed by the position of the residue within the sequence and by the identity of the newly substituted residue. Various methods for making the amino acid substitutions (mutations) provided herein are well known in the art, and are provided by, for example, Green and Sambrook, Molecular Cloning: A Laboratory Manual (4th ed., Cold Spring Harbor Laboratory Press, Cold Spring Harbor, N.Y. (2012)). Mutations can include a variety of categories, such as single base polymorphisms, microduplication regions, indel, and inversions, and is not meant to be limiting in any way. Mutations can include “loss-of-function” mutations which is the normal result of a mutation that reduces or abolishes a protein activity. Most loss-of-function mutations are recessive, because in a heterozygote the second chromosome copy carries an unmutated version of the gene coding for a fully functional protein whose presence compensates for the effect of the mutation. Mutations also embrace “gain-of-function” mutations, which is one which confers an abnormal activity on a protein or cell that is otherwise not present in a normal condition. Many gain-of-function mutations are in regulatory sequences rather than in coding regions, and can therefore have a number of consequences. For example, a mutation might lead to one or more genes being expressed in the wrong tissues, these tissues gaining functions that they normally lack. Because of their nature, gain-of-function mutations are usually dominant.

[0472] Mutations can be introduced into a reference Cas9 protein using site-directed mutagenesis. Older methods of site-directed mutagenesis known in the art rely on sub-cloning of the sequence to be mutated into a vector, such as an M13 bacteriophage vector, that allows the isolation of single-stranded DNA template. In these methods, one anneals a mutagenic primer (i.e., a primer capable of annealing to the site to be mutated but bearing one or more mismatched nucleotides at the site to be mutated) to the single-stranded template and then polymerizes the complement of the template starting from the 3′ end of the mutagenic primer. The resulting duplexes are then transformed into host bacteria and plaques are screened for the desired mutation. More recently, site-directed mutagenesis has employed PCR methodologies, which have the advantage of not requiring a single-stranded template. In addition, methods have been developed that do not require sub-cloning. Several issues must be considered when PCR-based site-directed mutagenesis is performed. First, in these methods it is desirable to reduce the number of PCR cycles to prevent expansion of undesired mutations introduced by the polymerase. Second, a selection must be employed in order to reduce the number of non-mutated parental molecules persisting in the reaction. Third, an extended-length PCR method is preferred in order to allow the use of a single PCR primer set. And fourth, because of the non-template-dependent terminal extension activity of some thermostable polymerases it is often necessary to incorporate an end-polishing step into the procedure prior to blunt-end ligation of the PCR-generated mutant product.

[0473] Mutations may also be introduced by directed evolution processes, such as phage-assisted continuous evolution (PACE) or phage-assisted noncontinuous evolution (PANCE). The term “phage-assisted continuous evolution (PACE),” as used herein, refers to continuous evolution that employs phage as viral vectors. The general concept of PACE technology has been described, for example, in International PCT Application, PCT/US2009/056194, filed September 8, 2009, published as WO 2010/028347 on March 11, 2010; International PCT Application, PCT/US2011/066747, filed Dec. 22, 2011, published as WO 2012/088381 on Jun. 28, 2012; U.S. Application, U.S. Pat. No. 9,023,594, issued May 5, 2015, International PCT Application, PCT/US2015/012022, filed Jan. 20, 2015, published as WO 2015/134121 on Sep. 11, 2015, and International PCT Application, PCT/US2016/027795, filed Apr. 15, 2016, published as WO 2016/168631 on Oct. 20, 2016, the entire contents of each of which are incorporated herein by reference. Variant Cas9s may also be obtain by phage-assisted non-continuous evolution (PANCE),” which as used herein, refers to non-continuous evolution that employs phage as viral vectors. PANCE is a simplified technique for rapid in vivo directed evolution using serial flask transfers of evolving ‘selection phage’ (SP), which contain a gene of interest to be evolved, across fresh E. coli host cells, thereby allowing genes inside the host E. coli to be held constant while genes contained in the SP continuously evolve. Serial flask transfers have long served as a widely-accessible approach for laboratory evolution of microbes, and, more recently, analogous approaches have been developed for bacteriophage evolution. The PANCE system features lower stringency than the PACE system.

[0474] Any of the references noted above which relate to Cas9 or Cas9 equivalents are hereby incorporated by reference in their entireties, if not already stated so.

[0475] J. Divided napDNAbp Domains for Split PE Delivery

[0476] In various embodiments, the prime editors described herein may be delivered to cells as two or more fragments which become assembled inside the cell (either by passive assembly, or by active assembly, such as using split intein sequences) into a reconstituted prime editor. In some cases, the self assembly may be passive whereby the two or more prime editor fragments associate inside the cell covalently or non-covalently to reconstitute the prime editor. In other cases, the self-assembly may be catalzyed by dimerization domains installed on each of the fragments. Examples of dimerization domains are described herein. In still other cases, the self-assembly may be catalyzed by split intein sequences installed on each of the prime editor fragments.

[0477] Split PE delivery may be advantageous to address various size constraints of different delivery approaches. For example, delivery approaches may include virus-based delivery methods, messenger RNA-based delivery methods, or RNP-based delivery (ribonucleoprotein-based delivery). And, each of these methods of delivery may be more efficient and/or effective by dividing up the prime editor into smaller pieces. Once inside the cell, the smaller pieces can assemble into a functional prime editor. Depending on the means of splitting, the divided prime editor fragments can be reassembled in a non-covalent manner or a covalent manner to reform the prime editor. In one embodiment, the prime editor can be split at one or more split sites into two or more fragments. The fragments can be unmodified (other than being split). Once the fragments are delivered to the cell (e.g., by direct delivery of a ribonucleoprotein complex or by nucleic delivery—e.g., mRNA delivery or virus vector based delivery), the fragments can reassociate covalently or non-covalently to reconstitute the prime editor. In another embodiment, the prime editor can be split at one or more split sites into two or more fragments. Each of the fragments can be modified to comprise a dimerization domain, whereby each fragment that is formed is coupled to a dimerization domain Once delivered or expressed within a cell, the dimerization domains of the different fragments associate and bind to one another, bringing the different prime editor fragments together to reform a functional prime editor. In yet another embodiment, the prime editor fragment may be modified to comprise a split intein. Once delivered or expressed within a cell, the split intein domains of the different fragments associate and bind to one another, and then undergo trans-splicing, which results in the excision of the split-intein domains from each of the fragments, and a concomitant formation of a peptide bond between the fragments, thereby restoring the prime editor.

[0478] In one embodiment, the prime editor can be delivered using a split-intein approach.

[0479] The location of the split site can be positioned between any one or more pair of residues in the prime editor and in any domains therein, including within the napDNAbp domain, the polymerase domain (e.g., RT domain), linker domain that joins the napDNAbp domain and the polymerase domain

[0480] In one embodiment, depicted in FIG. 66, the prime editor (PE) is divided at a split site within the napDNAbp.

[0481] In certain embodiments, the napDNAbp is a canonical SpCas9 polypeptide of SEQ ID NO: 18, as follows:

| | | |
|---|---|---|
| SpCas9 | MDKKYSIGLDIGTNSVGWAVITDEYKVPSKKFKVLGNTDR | SEQ ID NO: 18 |
| Streptococcus | HSIKKNLIGALLFDSGETAEATRLKRTARRRYTRRKNRICYL | |
| pyogenes | QEIFSNEMAKVDDSFFHRLEESFLVEEDKKHERHPIFGNIVD | |
| M1 | EVAYHEKYPTIYHLRKKLVDSTDKADLRLIYLALAHMIKFR | |
| SwissProt | GHFLIEGDLNPDNSDVDKLFIQLVQTYNQLFEENPINASGVD | |
| Accession | AKAILSARLSKSRRLENLIAQLPGEKKNGLFGNLIALSLGLTP | |
| No. Q99ZW2 | NFKSNFDLAEDAKLQLSKDTYDDDLDNLLAQIGDQYADLF | |
| Wild type | LAAKNLSDAILLSDILRVNTEITKAPLSASMIKRYDEHHQDL | |
| 1368 AA | TLLKALVRQQLPEKYKEIFFDQSKNGYAGYIDGGASQEEFY | |
| | KFIKPILEKMDGTEELLVKLNREDLLRKQRTFDNGSIPHQIHL | |
| | GELHAILRRQEDFYPFLKDNREKIEKILTFRIPYYVGPLARGN | |
| | SRFAWMTRKSEETITPWNFEEVVDKGASAQSFIERMTNFDK | |
| | NLPNEKVLPKHSLLYEYFTVYNELTKVKYVTEGMRKPAFLS | |
| | GEQKKAIVDLLFKTNRKVTVKQLKEDYFKKIECFDSVEISGV | |
| | EDRFNASLGTYHDLLKIIKDKDFLDNEENEDILEDIVLTLTLF | |
| | EDREMIEERLKTYAHLFDDKVMKQLKRRRYTGWGRLSRKL | |
| | INGIRDKQSGKTILDFLKSDGFANRNFMQLIHDDSLTFKEDIQ | |
| | KAQVSGQGDSLHEHIANLAGSPAIKKGILQTVKVVDELVKV | |
| | MGRHKPENIVIEMARENQTTQKGQKNSRERMKRIEEGIKEL | |
| | GSQILKEHPVENTQLQNEKLYLYYLQNGRDMYVDQELDIN | |
| | RLSDYDVDHIVPQSFLKDDSIDNKVLTRSDKNRGKSDNVPS | |
| | EEVVKKMKNYWRQLLNAKLITQRKFDNLTKAERGGLSELD | |
| | KAGFIKRQLVETRQITKHVAQILDSRMNTKYDENDKLIREV | |
| | KVITLKSKLVSDFRKDFQFYKVREINNYHHAHDAYLNAVV | |
| | GTALIKKYPKLESEFVYGDYKVYDVRKMIAKSEQEIGKATA | |
| | KYFFYSNIMNFFKTEITLANGEIRKRPLIETNGETGEIVWDKG | |
| | RDFATVRKVLSMPQVNIVKKTEVQTGGFSKESILPKRNSDK | |
| | LIARKKDWDPKKYGGFDSPTVAYSVLVVAKVEKGKSKKLK | |
| | SVKELLGITIMERSSFEKNPIDFLEAKGYKEVKKDLIIKLPKY | |
| | SLFELENGRKRMLASAGELQKGNELALPSKYVNFLYLASHY | |
| | EKLKGSPEDNEQKQLFVEQHKHYLDEIIEQISEFSKRVILADA | |
| | NLDKVLSAYNKHRDKPIREQAENIIHLFTLTNLGAPAAFKYF | |
| | DTTIDRKRYTSTKEVLDATLIHQSITGLYETRIDLSQLGGD | |

[0482] In certain embodiments, the SpCas9 is split into two fragments at a split site located between residues 1 and 2, or 2 and 3, or 3 and 4, or 4 and 5, or 5 and 6, or 6 and 7, or 7 and 8, or 8 and 9, or 9 and 10, or between any two pair of residues located anywhere between residues 1-10, 10-20, 20-30, 30-40, 40-50, 50-60, 60-70, 70-80, 80-90, 90-100, 100-200, 200-300, 300-400, 400-500, 500-600, 600-700, 700-800, 800-900, 1000-1100, 1100-1200, 1200-1300, or 1300-1368 of canonical SpCas9 of SEQ ID NO: 18.

[0483] In certain embodiments, a napDNAbp is split into two fragments at a split site that is located at a pair of residue that corresponds to any two pair of residues located anywhere between positions 1-10, 10-20, 20-30, 30-40, 40-50, 50-60, 60-70, 70-80, 80-90, 90-100, 100-200, 200-300, 300-400, 400-500, 500-600, 600-700, 700-800, 800-900, 1000-1100, 1100-1200, 1200-1300, or 1300-1368 of canonical SpCas9 of SEQ ID NO: 18.

[0484] In certain embodiments, the SpCas9 is split into two fragments at a split site located between residues 1 and 2, or 2 and 3, or 3 and 4, or 4 and 5, or 5 and 6, or 6 and 7, or 7 and 8, or 8 and 9, or 9 and 10, or between any two pair of residues located anywhere between residues 1-10, 10-20, 20-30, 30-40, 40-50, 50-60, 60-70, 70-80, 80-90, 90-100, 100-200, 200-300, 300-400, 400-500, 500-600, 600-700, 700-800, 800-900, 1000-1100, 1100-1200, 1200-1300, or 1300-1368 of canonical SpCas9 of SEQ ID NO: 18. In certain embodiments, the split site is located one or more polypeptide bond sites (i.e., a “split site or split-intein split site”), fused to a split intein, and then delivered to cells as separately-encoded fusion proteins. Once the split-intein fusion proteins (i.e., protein halves) are expressed within a cell, the proteins undergo trans-splicing to form a complete or whole PE with the concomitant removal of the joined split-intein sequences.

[0485] For example, as shown in FIG. 66, the N-terminal extein can be fused to a first split-intein (e.g., N intein) and the C-terminal extein can be fused to a second split-intein (e.g., C intein). The N-terminal extein becomes fused to the C-terminal extein to reform a whole prime editor fusion protein comprising an napDNAbp domain and a polymerase domain (e.g., RT domain) upon the self-association of the N intein and the C intein inside the cell, followed by their self-excision, and the concomitant formation of a peptide bond between the N-terminal extein and C-terminal extein portions of a whole prime editor (PE).

[0486] To take advantage of a split-PE delivery strategy using split-inteins, the prime editor needs to be divided at one or more split sites to create at least two separate halves of a prime editor, each of which may be rejoined inside a cell if each half is fused to a split-intein sequence.

[0487] In certain embodiments, the prime editor is split at a single split site. In certain other embodiments, the prime editor is split at two split sites, or three split sites, or four split sites, or more.

[0488] In a preferred embodiment, the prime editor is split at a single split site to create two separate halves of a prime editor, each of which can be fused to a split intein sequence

[0489] An exemplary split intein is the Ssp DnaE intein, which comprises two subunits, namely, DnaE-N and DnaE-C. The two different subunits are encoded by separate genes, namely dnaE-n and dnaE-c, which encode the DnaE-N and DnaE-C subunits, respectively. DnaE is a naturally occurring split intein in Synechocytis sp. PCC6803 and is capable of directing trans-splicing of two separate proteins, each comprising a fusion with either DnaE-N or DnaE-C.

[0490] Additional naturally occurring or engineered split-intein sequences are known in the or can be made from whole-intein sequences described herein or those available in the art. Examples of split-intein sequences can be found in Stevens et al., “A promiscuous split intein with expanded protein engineering applications,” PNAS, 2017, Vol.114: 8538-8543; Iwai et al., “Highly efficient protein trans-splicing by a naturally split DnaE intein from Nostc punctiforme, FEB S Lett, 580: 1853-1858, each of which are incorporated herein by reference. Additional split intein sequences can be found, for example, in WO 2013/045632, WO 2014/055782, WO 2016/069774, and EP2877490, the contents each of which are incorporated herein by reference.

[0491] In addition, protein splicing in trans has been described in vivo and in vitro (Shingledecker, et al., Gene 207:187 (1998), Southworth, et al., EMBO J. 17:918 (1998); Mills, et al., Proc. Natl. Acad. Sci. USA, 95:3543-3548 (1998); Lew, et al., J. Biol. Chem., 273:15887-15890 (1998); Wu, et al., Biochim. Biophys. Acta 35732:1 (1998b), Yamazaki, et al., J. Am. Chem. Soc. 120:5591 (1998), Evans, et al., J. Biol. Chem. 275:9091 (2000); Otomo, et al., Biochemistry 38:16040-16044 (1999); Otomo, et al., J. Biolmol. NMR 14:105-114 (1999); Scott, et al., Proc. Natl. Acad. Sci. USA 96:13638-13643 (1999)) and provides the opportunity to express a protein as to two inactive fragments that subsequently undergo ligation to form a functional product, e.g., as shown in FIGS. 66 and 67 with regard to the formation of a complete PE fusion protein from two separately-expressed halves.

[0492] In various embodiments described herein, the continuous evolution methods (e.g., PACE) may be used to evolve a first portion of a base editor. A first portion could include a single component or domain, e.g., a Cas9 domain, a deaminase domain, or a UGI domain The separately evolved component or domain can be then fused to the remaining portions of the base editor within a cell by separately express both the evolved portion and the remaining non-evolved portions with split-intein polypeptide domains. The first portion could more broadly include any first amino acid portion of a base editor that is desired to be evolved using a continuous evolution method described herein. The second portion would in this embodiment refer to the remaining amino acid portion of the base editor that is not evolved using the herein methods. The evolved first portion and the second portion of the base editor could each be expressed with split-intein polypeptide domains in a cell. The natural protein splicing mechanisms of the cell would reassemble the evolved first portion and the non-evolved second portion to form a single fusion protein evolved base editor. The evolved first portion may comprise either the N- or C-terminal part of the single fusion protein. In an analogous manner, use of a second orthogonal trans-splicing intein pair could allow the evolved first portion to comprise an internal part of the single fusion protein.

[0493] Thus, any of the evolved and non-evolved components of the base editors herein described may be expressed with split-intein tags in order to facilitate the formation of a complete base editor comprising the evolved and non-evolved component within a cell.

[0494] The mechanism of the protein splicing process has been studied in great detail (Chong, et al., J. Biol. Chem. 1996, 271, 22159-22168; Xu, M-Q & Perler, F. B. EMBO Journal, 1996, 15, 5146-5153) and conserved amino acids have been found at the intein and extein splicing points (Xu, et al., EMBO Journal, 1994, 13 5517-522). The constructs described herein contain an intein sequence fused to the 5′-terminus of the first gene (e.g., the evolved portion of the base editor). Suitable intein sequences can be selected from any of the proteins known to contain protein splicing elements. A database containing all known inteins can be found on the World Wide Web (Perler, F. B. Nucleic Acids Research, 1999, 27, 346-347). The intein sequence is fused at the 3′ end to the 5′ end of a second gene. For targeting of this gene to a certain organelle, a peptide signal can be fused to the coding sequence of the gene. After the second gene, the intein-gene sequence can be repeated as often as desired for expression of multiple proteins in the same cell. For multi-intein containing constructs, it may be useful to use intein elements from different sources. After the sequence of the last gene to be expressed, a transcription termination sequence must be inserted.In one embodiment, a modified intein splicing unit is designed so that it can both catalyze excision of the exteins from the inteins as well as prevent ligation of the exteins. Mutagenesis of the C-terminal extein junction in the Pyrococcus species GB-D DNA polymerase was found to produce an altered splicing element that induces cleavage of exteins and inteins but prevents subsequent ligation of the exteins (Xu, M-Q & Perler, F. B. EMBO Journal, 1996, 15, 5146-5153). Mutation of serine 538 to either an alanine or glycine induced cleavage but prevented ligation. Mutation of equivalent residues in other intein splicing units should also prevent extein ligation due to the conservation of amino acids at the C-terminal extein junction to the intein. A preferred intein not containing an endonuclease domain is the Mycobacterium xenopi GyrA protein (Telenti, et al. J. Bacteriol. 1997, 179, 6378-6382). Others have been found in nature or have been created artificially by removing the endonuclease domains from endonuclease containing inteins (Chong, et al. J. Biol. Chem. 1997, 272, 15587-15590). In a preferred embodiment, the intein is selected so that it consists of the minimal number of amino acids needed to perform the splicing function, such as the intein from the Mycobacterium xenopi GyrA protein (Telenti, A., et al., J. Bacteriol. 1997, 179, 6378-6382). In an alternative embodiment, an intein without endonuclease activity is selected, such as the intein from the Mycobacterium xenopi GyrA protein or the Saccharaomyces cerevisiae VMA intein that has been modified to remove endonuclease domains (Chong, 1997).Further modification of the intein splicing unit may allow the reaction rate of the cleavage reaction to be altered allowing protein dosage to be controlled by simply modifying the gene sequence of the splicing unit.

[0495] Inteins can also exist as two fragments encoded by two separately transcribed and translated genes. These so-called split inteins self-associate and catalyze protein-splicing activity in trans. Split inteins have been identified in diverse cyanobacteria and archaea (Caspi et al, Mol Microbiol. 50: 1569-1577 (2003); Choi J. et al, J Mol Biol. 556: 1093-1106 (2006.); Dassa B. et al, Biochemistry. 46:322-330 (2007.); Liu X. and Yang J., J Biol Chem. 275:26315-26318 (2003); Wu H. et al.

[0496] Proc Natl Acad Sci USA. £5:9226-9231 (1998.); and Zettler J. et al, FEB S Letters. 553:909-914 (2009)), but have not been found in eukaryotes thus far. Recently, a bioinformatic analysis of environmental metagenomic data revealed 26 different loci with a novel genomic arrangement. At each locus, a conserved enzyme coding region is interrupted by a split intein, with a freestanding endonuclease gene inserted between the sections coding for intein subdomains Among them, five loci were completely assembled: DNA helicases (gp41-1, gp41-8); Inosine-5 ′-monophosphate dehydrogenase (IMPDH-1); and Ribonucleotide reductase catalytic subunits (NrdA-2 and NrdJ-1). This fractured gene organization appears to be present mainly in phages (Dassa et al, Nucleic Acids Research. 57:2560-2573 (2009)).

[0497] The split intein Npu DnaE was characterized as having the highest rate reported for the protein trans-splicing reaction. In addition, the Npu DnaE protein splicing reaction is considered robust and high-yielding with respect to different extein sequences, temperatures from 6 to 37° C., and the presence of up to 6M Urea (Zettler J. et al, FEBS Letters. 553:909-914 (2009); Iwai I. et al, FEBS Letters 550: 1853-1858 (2006)). As expected, when the Cysl Ala mutation at the N-domain of these inteins was introduced, the initial N to S-acyl shift and therefore protein splicing was blocked. Unfortunately, the C-terminal cleavage reaction was also almost completely inhibited. The dependence of the asparagine cyclization at the C-terminal splice junction on the acyl shift at the N-terminal scissile peptide bond seems to be a unique property common to the naturally split DnaE intein alleles (Zettler J. et al. FEBS Letters. 555:909-914 (2009)).

[0498] The mechanism of protein splicing typically has four steps [29-30]: 1) an N—S or N—O acyl shift at the intein N-terminus, which breaks the upstream peptide bond and forms an ester bond between the N-extein and the side chain of the intein's first amino acid (Cys or Ser); 2) a transesterification relocating the N-extein to the intein C-terminus, forming a new ester bond linking the N-extein to the side chain of the C-extein's first amino acid (Cys, Ser, or Thr); 3) Asn cyclization breaking the peptide bond between the intein and the C-extein; and 4) a S—N or O—N acyl shift that replaces the ester bond with a peptide bond between the N-extein and C-extein.

[0499] Protein trans-splicing, catalyzed by split inteins, provides an entirely enzymatic method for protein ligation [31]. A split-intein is essentially a contiguous intein (e g a mini-intein) split into two pieces named N-intein and C-intein, respectively. The N-intein and C-intein of a split intein can associate non-covalently to form an active intein and catalyze the splicing reaction essentially in same way as a contiguous intein does. Split inteins have been found in nature and also engineered in laboratories [31-35]. As used herein, the term “split intein” refers to any intein in which one or more peptide bond breaks exists between the N-terminal and C-terminal amino acid sequences such that the N-terminal and C-terminal sequences become separate molecules that can non-covalently reassociate, or reconstitute, into an intein that is functional for trans-splicing reactions. Any catalytically active intein, or fragment thereof, may be used to derive a split intein for use in the methods of the invention. For example, in one aspect the split intein may be derived from a eukaryotic intein. In another aspect, the split intein may be derived from a bacterial intein. In another aspect, the split intein may be derived from an archaeal intein. Preferably, the split intein so-derived will possess only the amino acid sequences essential for catalyzing trans-splicing reactions.

[0500] As used herein, the “N-terminal split intein (In)” refers to any intein sequence that comprises an N-terminal amino acid sequence that is functional for trans-splicing reactions. An In thus also comprises a sequence that is spliced out when trans-splicing occurs. An In can comprise a sequence that is a modification of the N-terminal portion of a naturally occurring intein sequence. For example, an In can comprise additional amino acid residues and/or mutated residues so long as the inclusion of such additional and/or mutated residues does not render the In non-functional in trans-splicing. Preferably, the inclusion of the additional and/or mutated residues improves or enhances the trans-splicing activity of the In.

[0501] As used herein, the “C-terminal split intein (Ic)” refers to any intein sequence that comprises a C-terminal amino acid sequence that is functional for trans-splicing reactions. In one aspect, the Ic comprises 4 to 7 contiguous amino acid residues, at least 4 amino acids of which are from the last β-strand of the intein from which it was derived. An Ic thus also comprises a sequence that is spliced out when trans-splicing occurs. An Ic can comprise a sequence that is a modification of the C-terminal portion of a naturally occurring intein sequence. For example, an Ic can comprise additional amino acid residues and/or mutated residues so long as the inclusion of such additional and/or mutated residues does not render the In non-functional in trans-splicing. Preferably, the inclusion of the additional and/or mutated residues improves or enhances the trans-splicing activity of the Ic.

[0502] In some embodiments of the invention, a peptide linked to an Ic or an In can comprise an additional chemical moiety including, among others, fluorescence groups, biotin, polyethylene glycol (PEG), amino acid analogs, unnatural amino acids, phosphate groups, glycosyl groups, radioisotope labels, and pharmaceutical molecules. In other embodiments, a peptide linked to an Ic can comprise one or more chemically reactive groups including, among others, ketone, aldehyde, Cys residues and Lys residues. The N-intein and C-intein of a split intein can associate non-covalently to form an active intein and catalyze the splicing reaction when an “intein-splicing polypeptide (ISP)” is present. As used herein, “intein-splicing polypeptide (ISP)” refers to the portion of the amino acid sequence of a split intein that remains when the Ic, In, or both, are removed from the split intein. In certain embodiments, the In comprises the ISP. In another embodiment, the Ic comprises the ISP. In yet another embodiment, the ISP is a separate peptide that is not covalently linked to In nor to Ic.

[0503] Split inteins may be created from contiguous inteins by engineering one or more split sites in the unstructured loop or intervening amino acid sequence between the −12 conserved beta-strands found in the structure of mini-inteins [25-28]. Some flexibility in the position of the split site within regions between the beta-strands may exist, provided that creation of the split will not disrupt the structure of the intein, the structured beta-strands in particular, to a sufficient degree that protein splicing activity is lost.

[0504] In protein trans-splicing, one precursor protein consists of an N-extein part followed by the N-intein, another precursor protein consists of the C-intein followed by a C-extein part, and a trans-splicing reaction (catalyzed by the N- and C-inteins together) excises the two intein sequences and links the two extein sequences with a peptide bond. Protein trans-splicing, being an enzymatic reaction, can work with very low (e.g. micromolar) concentrations of proteins and can be carried out under physiological conditions.

### [2] Other Programmable Nucleases

[0505] In various embodiments described herein, the multi-flap prime editors comprise a napDNAbp, such as a Cas9 protein. These proteins are “programmable” by way of their becoming complexed with a guide RNA (or a PEgRNA, as the case may be), which guides the Cas9 protein to a target site on the DNA which possess a sequence that is complementary to the spacer portion of the gRNA (or PEgRNA) and also which possesses the required PAM sequence. However, in certain embodiment envisioned here, the napDNAbp may be substituted with a different type of programmable protein, such as a zinc finger nuclease or a transcription activator-like effector nuclease (TALEN).

[0506] FIG. 1J depicts such a variation of prime editing contemplated herein that replaces the napDNAbp (e.g., SpCas9 nickase) with any programmable nuclease domain, such as zinc finger nucleases (ZFN) or transcription activator-like effector nucleases (TALEN). As such, it is contemplated that suitable nucleases do not necessarily need to be “programmed” by a nucleic acid targeting molecule (such as a guide RNA), but rather, may be programmed by defining the specificity of a DNA-binding domain, such as and in particular, a nuclease. Just as in prime editing with napDNAbp moities, it is preferable that such alternative programmable nucleases be modified such that only one strand of a target DNA is cut. In other words, the programmable nucleases should function as nickases, preferably. Once a programmable nuclease is selected (e.g., a ZFN or a TALEN), then additional functionalities may be engineered into the system to allow it to operate in accordance with a prime editing-like mechanism. For example, the programmable nucleases may be modified by coupling (e.g., via a chemical linker) an RNA or DNA extension arm thereto, wherein the extension arm comprises a primer binding site (PBS) and a DNA synthesis template. The programmable nuclease may also be coupled (e.g., via a chemical or amino acid linker) to a polymerase, the nature of which will depend upon whether the extension arm is DNA or RNA. In the case of an RNA extension arm, the polymerase can be an RNA-dependent DNA polymerase (e.g., reverse transcriptase). In the case of a DNA extension arm, the polymerase can be a DNA-dependent DNA polymerase (e.g., a prokaryotic polymerase, including Pol I, Pol II, or Pol III, or a eukaryotic polymerase, including Pol a, Pol b, Pol g, Pol d, Pol e, or Pol z). The system may also include other functionalities added as fusions to the programmable nucleases, or added in trans to facilitate the reaction as a whole (e.g., (a) a helicase to unwind the DNA at the cut site to make the cut strand with the 3′ end available as a primer, (b) a FEN1 to help remove the endogenous strand on the cut strand to drive the reaction towards replacement of the endogenous strand with the synthesized strand, or (c) a nCas9:gRNA complex to create a second site nick on the opposite strand, which may help drive the integration of the synthesize repair through favored cellular repair of the non-edited strand). In an analogous manner to prime editing with a napDNAbp, such a complex with an otherwise programmable nuclease could be used to synthesize and then install a newly synthesized replacement strand of DNA carrying an edit of interest permanently into a target site of DNA.

[0507] Suitable alternative programmable nucleases are well known in the art which may be used in place of a napDNAbp:gRNA complex to construct an alternative prime editor system that can be programmed to selectively bind a target site of DNA, and which can be further modified in the manner described above to co-localize a polymerase and an RNA or DNA extension arm comprising a primer binding site and a DNA synthesis template to specific nick site . For example, and as represented in FIG. 1J, Transcription Activator-Like Effector Nucleases (TALENs) may be used as the programmable nuclease in the multi-flap prime editing methods and compositions of matter described herein. TALENS are artificial restriction enzymes generated by fusing the TAL effector DNA binding domain to a DNA cleavage domain. These reagents enable efficient, programmable, and specific DNA cleavage and represent powerful tools for genome editing in situ. Transcription activator-like effectors (TALEs) can be quickly engineered to bind practically any DNA sequence. The term TALEN, as used herein, is broad and includes a monomeric TALEN that can cleave double stranded DNA without assistance from another TALEN. The term TALEN is also used to refer to one or both members of a pair of TALENs that are engineered to work together to cleave DNA at the same site. TALENs that work together may be referred to as a left-TALEN and a right-TALEN, which references the handedness of DNA. See U.S. Ser. No. 12/965,590; U.S. Ser. No. 13/426,991 (U.S. Pat. No. 8,450,471); U.S. Ser. No. 13/427,040 (U.S. Pat. No. 8,440,431); U.S. Ser. No. 13/427,137 (U.S. Pat. No. 8,440,432); and U.S. Ser. No. 13/738,381, all of which are incorporated by reference herein in their entirety. In addition, TALENS are described in WO 2015/027134, U.S. Pat. No. 9,181,535, Boch et al., “Breaking the Code of DNA Binding Specificity of TAL-Type III Effectors”, Science, vol. 326, pp. 1509-1512 (2009), Bogdanove et al., TAL Effectors: Customizable Proteins for DNA Targeting, Science, vol. 333, pp. 1843-1846 (2011), Cade et al., “Highly efficient generation of heritable zebrafish gene mutations using homo- and heterodimeric TALENs”, Nucleic Acids Research, vol. 40, pp. 8001-8010 (2012), and Cermak et al., “Efficient design and assembly of custom TALEN and other TAL effector-based constructs for DNA targeting”, Nucleic Acids Research, vol. 39, No. 17, e82 (2011), each of which are incorporated herein by reference.

[0508] As represented in FIG. 1J, zinc finger nucleases may also be used as alternative programmable nucleases for use in multi-flap prime editing in place of napDNAbps, such as Cas9 nickases. Like with TALENS, the ZFN proteins may be modified such that they function as nickases, i.e., engineering the ZFN such that it cleaves only one strand of the target DNA in a manner similar to the napDNAbp used with the multi-flap prime editors described herein. ZFN proteins have been extensively described in the art, for example, in Carroll et al., “Genome Engineering with Zinc-Finger Nucleases,” Genetics, August 2011, Vol. 188: 773-782; Durai et al., “Zinc finger nucleases: custom-designed molecular scissors for genome engineering of plant and mammalian cells,” Nucleic Acids Res, 2005, Vol. 33: 5978-90; and Gaj et al., “ZFN, TALEN, and CRISPR/Cas-based methods for genome engineering,” Trends Biotechnol. 2013, Vol.31: 397-405, each of which are incorporated herein by reference in their entireties.

### [3] Polymerases (e.g., Reverse Transcriptases)

[0509] In various embodiments, the multi-flap prime editor system disclosed herein includes a polymerase (e.g., DNA-dependent DNA polymerase or RNA-dependent DNA polymerase, such as, reverse transcriptase), or a variant thereof, which can be provided as a fusion protein with a napDNAbp or other programmable nuclease, or provide in trans.

[0510] Any polymerase may be used in the multi-flap prime editors dislosed herein. The polymerases may be wild type polymerases, functional fragments, mutants, variants, or truncated variants, and the like. The polymerases may include wild type polymerases from eukaryotic, prokaryotic, archael, or viral organisms, and/or the polymerases may be modified by genetic engineering, mutagenesis, directed evolution-based processes. The polymerases may include T7 DNA polymerase, T5 DNA polymerase, T4 DNA polymerase, Klenow fragment DNA polymerase, DNA polymerase III and the like. The polymerases may also be thermostable, and may include Taq, Tne, Tma, Pfu, Tfl, Tth, Stoffel fragment, VENT® and DEEPVENT® DNA polymerases, KOD, Tgo, JDF3, and mutants, variants and derivatives thereof (see U.S. Pat. Nos. 5,436,149; 4,889,818; 4,965,185; 5,079,352; 5,614,365; 5,374,553; 5,270,179; 5,047,342; 5,512,462; WO 92/06188; WO 92/06200; WO 96/10640; Barnes, W. M., Gene 112:29-35 (1992); Lawyer, F. C., et al., PCR Meth. Appl. 2:275-287 (1993); Flaman, J.-M, et al., Nuc. Acids Res. 22(15):3259-3260 (1994), each of which are incorporated by reference). For synthesis of longer nucleic acid molecules (e.g, nucleic acid molecules longer than about 3-5 Kb in length), at least two DNA polymerases can be employed. In certain embodiments, one of the polymerases can be substantially lacking a 3′ exonuclease activity and the other may have a 3′ exonuclease activity. Such pairings may include polymerases that are the same or different. Examples of DNA polymerases substantially lacking in 3′ exonuclease activity include, but are not limited to, Taq, Tne(exo-), Tma(exo-), Pfu(exo-), Pwo(exo-), exo-KOD and Tth DNA polymerases, and mutants, variants and derivatives thereof.

[0511] Preferably, the polymerase usable in the multi-flap prime editors disclosed herein are “template-dependent” polymerase (since the polymerases are intended to rely on the DNA synthesis template to specify the sequence of the DNA strand under synthesis during prime editing. As used herein, the term “template DNA molecule” refers to that strand of a nucleic acid from which a complementary nucleic acid strand is synthesized by a DNA polymerase, for example, in a primer extension reaction of the DNA synthesis template of a PEgRNA.

[0512] As used herein, the term “template dependent manner” is intended to refer to a process that involves the template dependent extension of a primer molecule (e.g., DNA synthesis by DNA polymerase). The term “template dependent manner” refers to polynucleotide synthesis of RNA or DNA wherein the sequence of the newly synthesized strand of polynucleotide is dictated by the well-known rules of complementary base pairing (see, for example, Watson, J. D. et al., In: Molecular Biology of the Gene, 4th Ed., W. A. Benjamin, Inc., Menlo Park, Calif. (1987)). The term “complementary” refers to the broad concept of sequence complementarity between regions of two polynucleotide strands or between two nucleotides through base-pairing. It is known that an adenine nucleotide is capable of forming specific hydrogen bonds (“base pairing”) with a nucleotide which is thymine or uracil. Similarly, it is known that a cytosine nucleotide is capable of base pairing with a guanine nucleotide. As such, in the case of prime editing, it can be said that the single strand of DNA synthesized by the polymerase of the prime editor against the DNA synthesis template is said to be “complementary” to the sequence of the DNA synthesis template.

[0513] A. Exemplary Polymerases

[0514] In various embodiments, the multi-flap prime editors described herein comprise a polymerase. The disclosure contemplates any wild type polymerase obtained from any naturally-occurring organim or virus, or obtained from a commercial or non-commercial source. In addition, the polymerases usable in the multi-flap prime editors of the disclosure can include any naturally-occuring mutant polymerase, engineered mutant polymerase, or other variant polymerase, including truncated variants that retain function. The polymerases usable herein may also be engineered to contain specific amino acid substitutions, such as those specifically disclosed herein. In certain preferred embodiments, the polymerases usable in the multi-flap prime editors of the disclosure are template-based polymerases, i.e., they synthesize nucleotide sequences in a template-dependent manner

[0515] A polymerase is an enzyme that synthesizes a nucleotide strand and which may be used in connection with the multi-flap prime editor systems described herein. The polymerases are preferrably “template-dependent” polymerases (i.e., a polymerase which synthesizes a nucleotide strand based on the order of nucleotide bases of a template strand). In certain configurations, the polymerases can also be a “template-independent” (i.e., a polymerase which synthesizes a nucleotide strand without the requirement of a template strand). A polymerase may also be further categorized as a “DNA polymerase” or an “RNA polymerase.” In various embodiments, the multi-flap prime editor systems comprise a DNA polymerase. In various embodiments, the DNA polymerase can be a “DNA-dependent DNA polymerase” (i.e., whereby the template molecule is a strand of DNA). In such cases, the DNA template molecule can be a PEgRNA, wherein the extension arm comprises a strand of DNA. In such cases, the PEgRNA may be referred to as a chimeric or hybrid PEgRNA which comprises an RNA portion (i.e., the guide RNA components, including the spacer and the gRNA core) and a DNA portion (i.e., the extension arm). In various other embodiments, the DNA polymerase can be an “RNA-dependent DNA polymerase” (i.e., whereby the template molecule is a strand of RNA). In such cases, the PEgRNA is RNA, i.e., including an RNA extension. The term “polymerase” may also refer to an enzyme that catalyzes the polymerization of nucleotide (i.e., the polymerase activity). Generally, the enzyme will initiate synthesis at the 3′-end of a primer annealed to a polynucleotide template sequence (e.g., such as a primer sequence annealed to the primer binding site of a PEgRNA), and will proceed toward the 5′ end of the template strand. A “DNA polymerase” catalyzes the polymerization of deoxynucleotides. As used herein in reference to a DNA polymerase, the term DNA polymerase includes a “functional fragment thereof”. A “functional fragment thereof” refers to any portion of a wild-type or mutant DNA polymerase that encompasses less than the entire amino acid sequence of the polymerase and which retains the ability, under at least one set of conditions, to catalyze the polymerization of a polynucleotide. Such a functional fragment may exist as a separate entity, or it may be a constituent of a larger polypeptide, such as a fusion protein.

[0516] In some embodiments, the polymerases can be from bacteriophage. Bacteriophage DNA polymerases are generally devoid of 5′ to 3′ exonuclease activity, as this activity is encoded by a separate polypeptide. Examples of suitable DNA polymerases are T4, T7, and phi29 DNA polymerase. The enzymes available commercially are: T4 (available from many sources e.g., Epicentre) and T7 (available from many sources, e.g. Epicentre for unmodified and USB for 3′ to 5′ exo T7 “Sequenase” DNA polymerase).

[0517] The other embodiments, the polymerases are archaeal polymerases. There are 2 different classes of DNA polymerases which have been identified in archaea: 1. Family B/pol I type (homologs of Pfu from Pyrococcus furiosus) and 2. pol II type (homologs of P. furiosus DP1/DP2 2-subunit polymerase). DNA polymerases from both classes have been shown to naturally lack an associated 5′ to 3′ exonuclease activity and to possess 3′ to 5′ exonuclease (proofreading) activity. Suitable DNA polymerases (pol I or pol II) can be derived from archaea with optimal growth temperatures that are similar to the desired assay temperatures.

[0518] Thermostable archaeal DNA polymerases are isolated from Pyrococcus species (furiosus, species GB-D, woesii, abysii, horikoshii), Thermococcus species (kodakaraensis KOD1, litoralis, species 9 degrees North-7, species JDF-3, gorgonarius), Pyrodictium occultum, and Archaeoglobus fulgidus.

[0519] Polymerases may also be from eubacterial species. There are 3 classes of eubacterial DNA polymerases, pol I, II, and III. Enzymes in the Pol I DNA polymerase family possess 5′ to 3′ exonuclease activity, and certain members also exhibit 3′ to 5′ exonuclease activity. Pol II DNA polymerases naturally lack 5′ to 3′ exonuclease activity, but do exhibit 3′ to 5′ exonuclease activity. Pol III DNA polymerases represent the major replicative DNA polymerase of the cell and are composed of multiple subunits. The pol III catalytic subunit lacks 5′ to 3′ exonuclease activity, but in some cases 3′ to 5′ exonuclease activity is located in the same polypeptide.

[0520] There are a variety of commercially available Pol I DNA polymerases, some of which have been modified to reduce or abolish 5′ to 3′ exonuclease activity.

[0521] Suitable thermostable pol I DNA polymerases can be isolated from a variety of thermophilic eubacteria, including Thermus species and Thermotoga maritima such as Thermus aquaticus (Taq), Thermus thermophilus (Tth) and Thermotoga maritima (Tma UlTma).

[0522] Additional eubacteria related to those listed above are described in Thermophilic Bacteria (Kristjansson, J. K., ed.) CRC Press, Inc., Boca Raton, Fla., 1992.

[0523] The invention further provides for chimeric or non-chimeric DNA polymerases that are chemically modified according to methods disclosed in U.S. Pat. Nos. 5,677,152, 6,479,264 and 6,183,998, the contents of which are hereby incorporated by reference in their entirety.

[0524] Additional archaea DNA polymerases related to those listed above are described in the following references: Archaea: A Laboratory Manual (Robb, F. T. and Place, A. R., eds.), Cold Spring Harbor Laboratory Press, Cold Spring Harbor, N.Y., 1995 and Thermophilic Bacteria (Kristjansson, J. K., ed.) CRC Press, Inc., Boca Raton, Fla., 1992.

[0525] B. Exemplarly Reverse Transcriptases

[0526] In various embodiments, the multi-flap prime editors described herein comprise a reverse transcriptase as the polymerase. The disclosure contemplates any wild type reverse transcriptase obtained from any naturally-occurring organim or virus, or obtained from a commercial or non-commercial source. In addition, the reverse transcriptases usable in the multi-flap prime editors of the disclosure can include any naturally-occuring mutant RT, engineered mutant RT, or other variant RT, including truncated variants that retain function. The RTs may also be engineered to contain specific amino acid substitutions, such as those specifically disclosed herein.

[0527] Reverse transcriptases are multi-functional enzymes typically with three enzymatic activities including RNA- and DNA-dependent DNA polymerization activity, and an RNaseH activity that catalyzes the cleavage of RNA in RNA-DNA hybrids. Some mutants of reverse transcriptases have disabled the RNaseH moiety to prevent unintended damage to the mRNA. These enzymes that synthesize complementary DNA (cDNA) using mRNA as a template were first identified in RNA viruses. Subsequently, reverse transcriptases were isolated and purified directly from virus particles, cells or tissues. (e.g., see Kacian et al., 1971, Biochim. Biophys. Acta 46: 365-83; Yang et al., 1972, Biochem. Biophys. Res. Comm 47: 505-11; Gerard et al., 1975, J. Virol. 15: 785-97; Liu et al., 1977, Arch. Virol. 55 187-200; Kato et al., 1984, J. Virol. Methods 9: 325-39; Luke et al., 1990, Biochem. 29: 1764-69 and Le Grice et al., 1991, J. Virol. 65: 7004-07, each of which are incorporated by reference). More recently, mutants and fusion proteins have been created in the quest for improved properties such as thermostability, fidelity and activity. Any of the wild type, variant, and/or mutant forms of reverse transcriptase which are known in the art or which can be made using methods known in the art are contemplated herein.

[0528] The reverse transcriptase (RT) gene (or the genetic information contained therein) can be obtained from a number of different sources. For instance, the gene may be obtained from eukaryotic cells which are infected with retrovirus, or from a number of plasmids which contain either a portion of or the entire retrovirus genome. In addition, messenger RNA-like RNA which contains the RT gene can be obtained from retroviruses. Examples of sources for RT include, but are not limited to, Moloney murine leukemia virus (M-MLV or MLVRT); human T-cell leukemia virus type 1 (HTLV-1); bovine leukemia virus (BLV); Rous Sarcoma Virus (RSV); human immunodeficiency virus (HIV); yeast, including Saccharomyces, Neurospora, Drosophila; primates; and rodents. See, for example, Weiss, et al., U.S. Pat. No. 4,663,290 (1987); Gerard, G. R., DNA:271-79 (1986); Kotewicz, M. L., et al., Gene 35:249-58 (1985); Tanese, N., et al., Proc. Natl. Acad. Sci. (USA):4944-48 (1985); Roth, M. J., at al., J. Biol. Chem. 260:9326-35 (1985); Michel, F., et al., Nature 316:641-43 (1985); Akins, R. A., et al., Cell 47:505-16 (1986), EMBO J. 4:1267-75 (1985); and Fawcett, D. F., Cell 47:1007-15 (1986) (each of which are incorporated herein by reference in their entireties).

### Wild Type RTs

[0529] Exemplary enzymes for use with the herein disclosed multi-flap prime editors can include, but are not limited to, M-MLV reverse transcriptase and RSV reverse transcriptase. Enzymes having reverse transcriptase activity are commercially available. In certain embodiments, the reverse transcriptase provided in trans to the other components of the multi-flap prime editor (PE) system. That is, the reverse transcriptase is expressed or otherwise provided as an individual component, i.e., not as a fusion protein with a napDNAbp.

[0530] A person of ordinary skill in the art will recognize that wild type reverse transcriptases, including but not limited to, Moloney Murine Leukemia Virus (M-MLV); Human Immunodeficiency Virus (HIV) reverse transcriptase and avian Sarcoma-Leukosis Virus (ASLV) reverse transcriptase, which includes but is not limited to Rous Sarcoma Virus (RSV) reverse transcriptase, Avian Myeloblastosis Virus (AMV) reverse transcriptase, Avian Erythroblastosis Virus (AEV) Helper Virus MCAV reverse transcriptase, Avian Myelocytomatosis Virus MC29 Helper Virus MCAV reverse transcriptase, Avian Reticuloendotheliosis Virus (REV-T) Helper Virus REV-A reverse transcriptase, Avian Sarcoma Virus UR2 Helper Virus UR2AV reverse transcriptase, Avian Sarcoma Virus Y73 Helper Virus YAV reverse transcriptase, Rous Associated Virus (RAV) reverse transcriptase, and Myeloblastosis Associated Virus (MAV) reverse transcriptase may be suitably used in the subject methods and composition described herein.

[0531] Exemplary wild type RT enzymes are as follows:

| DESCRIPTION | SEQUENCE |
|---|---|
| REVERSE | TLNIEDEYRLHETSKEPDVSLGSTWLSDFPQAWAETGGMGLAVRQA |
| TRANSCRIPTASE (M- | PLIIPLKATSTPVSIKQYPMSQEARLGIKPHIQRLLDQGILVPCQSPWN |
| MLV RT) WILD TYPE | TPLLPVKKPGTNDYRPVQDLREVNKRVEDIHPTVPNPYNLLSGLPPS |
| MOLONEY MURINE | HQWYTVLDLKDAFFCLRLHPTSQPLFAFEWRDPEMGISGQLTWTRL |
| LEUKEMIA VIRUS | PQGFKNSPTLFDEALHRDLADFRIQHPDLILLQYVDDLLLAATSELD |
| USED IN PE1 (PRIME | CQQGTRALLQTLGNLGYRASAKKAQICQKQVKYLGYLLKEGQRW |
| EDITOR 1 FUSION | LTEARKETVMGQPTPKTPRQLREFLGTAGFCRLWIPGFAEMAAPLYP |
| PROTEIN DISCLOSED | LTKTGTLFNWGPDQQKAYQEIKQALLTAPALGLPDLTKPFELFVDEK |
| HEREIN) | QGYAKGVLTQKLGPWRRPVAYLSKKLDPVAAGWPPCLRMVAAIAV |
| | LTKDAGKLTMGQPLVILAPHAVEALVKQPPDRWLSNARMTHYQALL |
| | LDTDRVQFGPVVALNPATLLPLPEEGLQHNCLDILAEAHGTRPDLTD |
| | QPLPDADHTWYTDGSSLLQEGQRKAGAAVTTETEVIWAKALPAGTS |
| | AQRAELIALTQALKMAEGKKLNVYTDSRYAFATAHIHGEIYRRRGLL |
| | TSEGKEIKNKDEILALLKALFLPKRLSIIHCPGHQKGHSAEARGNRM |
| | ADQAARKAAITETPDTSTLLIENSSP (SEQ ID NO: 700) |
| REVERSE | AFPLERPDWDYTTQAGRNHLVHYRQLLLAGLQNAGRSPTNLAKVK |
| TRANSCRIPTASE | GITQGPNESPSAFLERLKEAYRRYTPYDPEDPGQETNVSMSFIWQSA |
| MOLONEY MURINE | PDIGRKLGRLEDLKSKTLGDLVREAEKIFNKRETPEEREERIRRETEE |
| LEUKEMIA VIRUS | KEERRRTVDEQKEKERDRRRHREMSKLLATVVIGQEQDRQEGERK |
| REF SEQ. AAA66622.1 | RPQLDKDQCAYCKEKGHWAKDCPKKPRGPRGPRPQTSLLTLGDXG |
| | GQGQDPPPEPRITLKVGGQPVTFLVDTGAQHSVLTQNPGPLSDKSA |
| | WVQGATGGKRYRWTTDRKVHLATGKVTHSFLHVPDCPYPLLGRDL |
| | LTKLKAQIHFEGSGAQVVGPMGQPLQVLTLNIEDEYRLHETSKEPDV |
| | SLGFTWLSDFPQAWAESGGMGLAVRQAPLIIPLKATSTPVSIKQYPM |
| | SQEARLGIKPHIQRLLDQGILVPCQSPWNTPLLPVKKPGTNDYRPVQ |
| | DLREVNKRVEDIHPTVPNPYNLLSGLPPSHQWYTVLDLKDAFFCLR |
| | LHPTSQPLFAFEWRDPEMGISGQLTWTRLPQGFKNSPTLFDEALHRD |
| | LADFR (SEQ ID NO: 90) |
| REVERSE | TLQLEEEYRLFEPESTQKQEMDIWLKNFPQAWAETGGMGTAHCQA |
| TRANSCRIPTASE | PVLIQLKATATPISIRQYPMPHEAYQGIKPHIRRMLDQGILKPCQSPW |
| FELINE LEUKEMIA | NTPLLPVKKPGTEDYRPVQDLREVNKRVEDIHPTVPNPYNLLSTLPP |
| VIRUS | SHPWYTVLDLKDAFFCLRLHSESQLLFAFEWRDPEIGLSGQLTWTRL |
| REF SEQ. NP955579.1 | PQGFKNSPTLFDEALHSDLADFRVRYPALVLLQYVDDLLLAAATRTE |
| | CLEGTKALLETLGNKGYRASAKKAQICLQEVTYLGYSLKDGQRWL |
| | TKARKEAILSIPVPKNSRQVREFLGTAGYCRLWIPGFAELAAPLYPLT |
| | RPGTLFQWGTEQQLAFEDIKKALLSSPALGLPDITKPFELFIDENSGF |
| | AKGVLVQKLGPWKRPVAYLSKKLDTVASGWPPCLRMVAAIAILVKD |
| | AGKLTLGQPLTILTSHPVEALVRQPPNKWLSNARMTHYQAMLLDAE |
| | RVHFGPTVSLNPATLLPLPSGGNHHDCLQILAETHGTRPDLTDQPLPD |
| | ADLTWYTDGSSFIRNGEREAGAAVTTESEVIWAAPLPPGTSAQRAEL |
| | IALTQALKMAEGKKLTVYTDSRYAFATTHVHGEIYRRRGLLTSEGKE |
| | IKNKNEILALLEALFLPKRLSIIHCPGHQKGDSPQAKGNRLADDTAK |
| | KAATETHSSLTVL |
| | SEQ ID NO: 91) |
| REVERSE | PISPIETVPVKLKPGMDGPKVKQWPLTEEKIKALVEICTEMEKEGKIS |
| TRANSCRIPTASE | KIGPENPYNTPVFAIKKKDSTKWRKLVDFRELNKRTQDFWEVQLGIP |
| HIV-1 RT, CHAIN A | HPAGLKKKKSVTVLDVGDAYFSVPLDEDFRKYTAFTIPSINNETPGIR |
| REF SEQ. ITL3-A | YQYNVLPQGWKGSPAIFQSSMTKILEPFRKQNPDIVIYQYMDDLYV |
| | GSDLEIGQHRTKIEELRQHLLRWGLTTPDKKHQKEPPFLWMGYELH |
| | PDKWTVQPIVLPEKDSWTVNDIQKLVGKLNWASQIYPGIKVRQLXK |
| | LLRGTKALTEVIPLTEEAELELAENREILKEPVHGVYYDPSKDLIAEI |
| | QKQGQGQWTYQIYQEPFKNLKTGKYARMRGAHTNDVKQLTEAVQ |
| | KITTESIVIWGKTPKFKLPIQKETWETWWTEYWQATWIPEWEFVNT |
| | PPLVKLWYQLEKEPIVGAETFYVDGAANRETKLGKAGYVTNRGRQ |
| | KVVTLTDTTNQKTELQAIYLALQDSGLEVNIVTDSQYALGIIQAQPD |
| | QSESELVNQIIEQLIKKEKVYLAWVPAHKGIGGNEQVDKLVSAGIRK |
| | V (SEQ ID NO: 92) |
| | SEE MARTINELLI ET AL., VIROLOGY, 1990, 174(1): 135- |
| | 144, WHICH IS INCORPORATED BY REFERENCE |
| REVERSE | PISPIETVPVKLKPGMDGPKVKQWPLTEEKIKALVEICTEMEKEGKIS |
| TRANSCRIPTASE | KIGPENPYNTPVFAIKKKDSTKWRKLVDFRELNKRTQDFWEVQLGIP |
| HIV-1 RT, CHAIN B | HPAGLKKKKSVTVLDVGDAYFSVPLDEDFRKYTAFTIPSINNETPGIR |
| REF SEQ. ITL3-B | YQYNVLPQGWKGSPAIFQSSMTKILEPFRKQNPDIVIYQYMDDLYV |
| | GSDLEIGQHRTKIEELRQHLLRWGLTTPDKKHQKEPPFLWMGYELH |
| | PDKWTVQPIVLPEKDSWTVNDIQKLVGKLNWASQIYPGIKVRQLCK |
| | LLRGTKALTEVIPLTEEAELELAENREILKEPVHGVYYDPSKDLIAEI |
| | QKQGQGQWTYQIYQEPFKNLKTGKYARMRGAHTNDVKQLTEAVQ |
| | KITTESIVIWGKTPKFKLPIQKETWETWWTEYWQATWIPEWEFVNT |
| | PPLVKLWYQLEKEPIVGAETF (SEQ ID NO: 93) |
| | SEE STAMMERS ET AL., J. MOL. BIOL., 1994, 242(4): 586- |
| | 588, WHICH IS INCORPORATED BY REFERENCE |
| REVERSE | TVALHLAIPLKWKPNHTPVWIDQWPLPEGKLVALTQLVEKELQLGHI |
| TRANSCRIPTASE | EPSLSCWNTPVFVIRKASGSYRLLHDLRAVNAKLVPFGAVQQGAPV |
| ROUS SARCOMA | LSALPRGWPLMVLDLKDCFFSIPLAEQDREAFAFTLPSVNNQAPARR |
| VIRUS RT | FQWKVLPQGMTCSPTICQLIVGQILEPLRLKHPSLRMLHYMDDLLL |
| REF SEQ. ACL14945 | AASSHDGLEAAGEEVISTLERAGFTISPDKVQKEPGVQYLGYKLGST |
| | YAAPVGLVAEPRIATLWDVQKLVGSLQWLRPALGIPPRLRGPFYEQL |
| | RGSDPNEAREWNLDMKMAWREIVQLSTTAALERWDPALPLEGAVA |
| | RCEQGAIGVLGQGLSTHPRPCLWLFSTQPTKAFTAWLEVLTLLITKL |
| | RASAVRTFGKEVDILLLPACFRDELPLPEGILLALRGFAGKIRSSDTPS |
| | IFDIARPLHVSLKVRVTDHPVPGPTVFTDASSSTHKGVVVWREGPR |
| | WEIKEIADLGASVQQLEARAVAMALLLWPTTPTNVVTDSAFVAKML |
| | LKMGQEGVPSTAAAFILEDALSQRSAMAAVLHVRSHSEVPGFFTEG |
| | NDVADSQATFQAYPLREAKDLHTALHIGPRALSKACNISMQQAREV |
| | VQTCPHCNSAPALEAGVNPRGLGPLQIWQTDFTLEPRMAPRSWLAV |
| | TVDTASSAIVVTQHGRVTSVAAQHHWATVIAVLGRPKAIKTDNGSCF |
| | TSKSTREWLARWGIAHTTGIPGNSQGQAMVERANRLLKDKIRVLAE |
| | GDGFMKRIPTSKQGELLAKAMYALNHFERGENTKTPIQKHWRPTVL |
| | TEGPPVKIRIETGEWEKGWNVLVWGRGYAAVKNRDTDKVIWVPSR |
| | KVKPDIAQKDEVTKKDEASPLFA (SEQ ID NO: 94) |
| | SEE YASUKAWA ET AL., J. BIOCHEM. 2009, 145(3): 315- |
| | 324, WHICH IS INCORPORATED BY REFERENCE |
| REVERSE | MMDHLLQKTQIQNQTEQVMNITNPNSIYIKGRLYFKGYKKIELHCF |
| TRANSCRIPTASE | VDTGASLCIASKFVIPEEHWINAERPIMVKIADGSSITINKVCRDIDLII |
| CAULIFLOWER | AGEIFHIPTVYQQESGIDFIIGNNFCQLYEPFIQFTDRVIFTKDRTYPVH |
| MOSAIC VIRUS RT | IAKLTRAVRVGTEGFLESMKKRSKTQQPEPVNISTNKIAILSEGRRLS |
| REF SEQ. AGT42196 | EEKLFITQQRMQKIEELLEKVCSENPLDPNKTKQWMKASIKLSDPSK |
| | AIKVKPMKYSPMDREEFDKQIKELLDLKVIKPSKSPHMAPAFLVNNE |
| | AEKRRGKKRMVVNYKAMNKATVGDAYNLPNKDELLTLIRGKKIFS |
| | SFDCKSGFWQVLLDQDSRPLTAFTCPQGHYEWNVVPFGLKQAPSIF |
| | QRHMDEAFRVFRKFCCVYVDDILVFSNNEEDHLLHVAMILQKCNQH |
| | GIILSKKKAQLFKKKINFLGLEIDEGTHKPQGHILEHINKFPDTLEDK |
| | KQLQRFLGILTYASDYIPKLAQIRKPLQAKLKENVPWKWTKEDTLY |
| | MQKVKKNLQGFPPLHHPLPEEKLIIETDASDDYWGGMLKAIKINEG |
| | TNTELICRYASGSFKAAEKNYHSNDKETLAVINTIKKFSIYLTPVHFLI |
| | RTDNTHFKSFVNLNYKGDSKLGRNIRWQAWLSHYSFDVEHIKGTD |
| | NHFADFLSREFNRVNS (SEQ ID NO: 95) |
| | SEE FARZADFAR ET AL., VIRUS GENES, 2013, 47(2): 347- |
| | 356, WHICH IS INCORPORATED BY REFERENCE |
| REVERSE | MKEKISKIDKNFYTDIFIKTSFQNEFEAGGVIPPIAKNQVSTISNKNKT |
| TRANSCRIPTASE | FYSLAHSSPHYSIQTRIEKFLLKNIPLSASSFAFRKERSYLHYLEPHTQ |
| KLEBSIELLA | NVKYCHLDIVSFFHSIDVNIVRDTFSVYFSDEFLVKEKQSLLDAFMA |
| PNEUMONIA | SVTLTAELDGVEKTFIPMGFKSSPSISNIIFRKIDILIQKFCDKNKITYT |
| REF SEQ. RFF81513.1 | RYADDLLFSTKKENNILSSTFFINEISSILSINKFKLNKSKYLYKEGTIS |
| | LGGYVIENILKDNSSGNIRLSSSKLNPLYKALYEIKKGSSSKHICIKVF |
| | NLKLKRFIYKKNKEKFEAKFYSSQLKNKLLGYRSYLLSFVIFHKKYK |
| | CINPIFLEKCVFLISEIESIMNRKF(SEQ ID NO: 96) |
| REVERSE | MKITSNNVTAVINGKGWHSINWKKCHQHVKTIQTRIAKAACNQQW |
| TRANSCRIPTASE | RTVGRLQRLLVRSFSARALAVKRVTENSGRKTPGVDGQIWSTPESK |
| ESCHERICHIA COLI | WEAIFKLRRKGYKPLPLKRVFIPKSNGKKRPLGIPVMLDRAMQALH |
| RT | LLGLEPVSETNADHNSYGFRPARCTADAIQQVCNMYSSRNASKWVL |
| REF SEQ. TGH57013 | EGDIKGCFEHISHEWLLENIPMDKQILRNWLKAGIIEKSIFSKTLSGTP |
| | QGGIISPVLANMALDGLERLLQNRFGRNRLI (SEQ ID NO: 97) |
| REVERSE | MSKIKINYEKYHIKPFPHFDQRIKVNKKVKENLQNPFYIAAHSFYPFI |
| TRANSCRIPTASE | HYKKISYKFKNGTLSSPKERDIFYSGHMDGYIYKHYGEILNHKYNN |
| BACILLUS SUBTILIS | TCIGKGIDHVSLAYRNNKMGKSNIHFAAEVINFISEQQQAFIFVSDFS |
| RT | SYFDSLDHAILKEKLIEVLEEQDKLSKDWWNVFKHITRYNWVEKEE |
| REF SEQ. QBJ66766 | VISDLECTKEKIARDKKSRERYYTPAEFREFRKRVNIKSNDTGVGIPQ |
| | GTAISAVLANVYAIDLDQKLNQYALKYGGIYRRYSDDIIMVLPMTSD |
| | GQDPSNDHVSFIKSVVKRNKVTMGDSKTSVLYYANNNIYEDYQRK |
| | RESKMDYLGFSFDGMTVKIREKSLFKYYHRTYKKINSINWASVKKE |
| | KKVGRKKLYLLYSHLGRNYKGHGNFISYCKKAHAVFEGNKKIESLI |
| | NQQIKRHWKKIQKRLVDV(SEQ ID NO: 98) |
| EUBACTERIUM | DTSNLMEQILSSDNLNRAYLQVVRNKGAEGVDGMKYTELKEHLAK |
| RECTALE GROUP II | NGETIKGQLRTRKYKPQPARRVEIPKPDGGVRNLGVPTVTDRFIQQA |
| INTRON RT | IAQVLTPIYEEQFHDHSYGFRPNRCAQQAILTALNIMNDGNDWIVDI |
| | DLEKFFDTVNHDKLMTLIGRTIKDGDVISIVRKYLVSGIMIDDEYEDS |
| | IVGTPQGGNLSPLLANIMLNELDKEMEKRGLNFVRYADDCIIMVGSE |
| | MSANRVMRNISRFIEEKLGLKVNMTKSKVDRPSGLKYLGFGFYFDP |
| | RAHQFKAKPHAKSVAKFKKRMKELTCRSWGVSNSYKVEKLNQLIR |
| | GWINYFKIGSMKTLCKELDSRIRYRLRMCIWKQWKTPQNQEKNLV |
| | KLGIDRNTARRVAYTGKRIAYVCNKGAVNVAISNKRLASFGLISMLD |
| | YYIEKCVTC (SEQ ID NO: 99) |
| GEOBACILLUS | ALLERILARDNLITALKRVEANQGAPGIDGVSTDQLRDYIRAHWSTI |
| STEAROTHERMOPHIL | HAQLLAGTYRPAPVRRVEIPKPGGGTRQLGIPTVVDRLIQQAILQELT |
| US GROUP II INTRON | PIFDPDFSSSSFGFRPGRNAHDAVRQAQGYIQEGYRYVVDMDLEKFF |
| RT | DRVNHDILMSRVARKVKDKRVLKLIRAYLQAGVMIEGVKVQTEEGT |
| | PQGGPLSPLLANILLDDLDKELEKRGLKFCRYADDCNIYVKSLRAGQ |
| | RVKQSIQRFLEKTLKLKVNEEKSAVDRPWKRAFLGFSFTPERKARIR |
| | LAPRSIQRLKQRIRQLTNPNWSISMPERIHRVNQYVMGWIGYFRLVE |
| | TPSVLQTIEGWIRRRLRLCQWLQWKRVRTRIRELRALGLKETAVMEI |
| | ANTRKGAWRTTKTPQLHQALGKTYWTAQGLKSLTQR(SEQ ID NO: |
| | 100) |

### Variant and Error-Prone RTs

[0532] Reverse transcriptases are essential for synthesizing complementary DNA (cDNA) strands from RNA templates. Reverse transcriptases are enzymes composed of distinct domains that exhibit different biochemical activities. The enzymes catalyze the synthesis of DNA from an RNA template, as follows: In the presence of an annealed primer, reverse transcriptase binds to an RNA template and initiates the polymerization reaction. RNA-dependent DNA polymerase activity synthesizes the complementary DNA (cDNA) strand, incorporating dNTPs. RNase H activity degrades the RNA template of the DNA:RNA complex. Thus, reverse transcriptases comprise (a) a binding activity that recognizes and binds to a RNA/DNA hybrid, (b) an RNA-dependent DNA polymerase activity, and (c) an RNase H activity. In addition, reverse transcriptases generally are regarded as having various attributes, including their thermostability, processivity (rate of dNTP incorporation), and fidelity (or error-rate). The reverse transcriptase variants contemplated herein may include any mutations to reverse transcriptase that impacts or changes any one or more of these enzymatic activities (e.g., RNA-dependent DNA polymerase activity, RNase H activity, or DNA/RNA hybrid-binding activity) or enzyme properties (e.g., thermostability, processivity, or fidelity). Such variants may be available in the art in the public domain, available commercially, or may be made using known methods of mutagenesis, including directed evolutionary processes (e.g., PACE or PANCE).

[0533] In various embodiments, the reverse transcriptase may be a variant reverse transcriptase. As used herein, a “variant reverse transcriptase” includes any naturally occurring or genetically engineered variant comprising one or more mutations (including singular mutations, inversions, deletions, insertions, and rearrangements) relative to a reference sequences (e.g., a reference wild type sequence). RT naturally have several activities, including an RNA-dependent DNA polymerase activity, ribonuclease H activity, and DNA-dependent DNA polymerase activity. Collectively, these activities enable the enzyme to convert single-stranded RNA into double-stranded cDNA. In retroviruses and retrotransposons, this cDNA can then integrate into the host genome, from which new RNA copies can be made via host-cell transcription. Variant RT's may comprise a mutation which impacts one or more of these activities (either which reduces or increases these activities, or which eliminates these activities all together). In addition, variant RTs may comprise one or more mutations which render the RT more or less stable, less prone to aggregration, and facilitates purification and/or detection, and/or other the modification of properties or characteristics.

[0534] A person of ordinary skill in the art will recognize that variant reverse transcriptases derived from other reverse transcriptases, including but not limited to Moloney Murine Leukemia Virus (M-MLV); Human Immunodeficiency Virus (HIV) reverse transcriptase and avian Sarcoma-Leukosis Virus (ASLV) reverse transcriptase, which includes but is not limited to Rous Sarcoma Virus (RSV) reverse transcriptase, Avian Myeloblastosis Virus (AMV) reverse transcriptase, Avian Erythroblastosis Virus (AEV) Helper Virus MCAV reverse transcriptase, Avian Myelocytomatosis Virus MC29 Helper Virus MCAV reverse transcriptase, Avian Reticuloendotheliosis Virus (REV-T) Helper Virus REV-A reverse transcriptase, Avian Sarcoma Virus UR2 Helper Virus UR2AV reverse transcriptase, Avian Sarcoma Virus Y73 Helper Virus YAV reverse transcriptase, Rous Associated Virus (RAV) reverse transcriptase, and Myeloblastosis Associated Virus (MAV) reverse transcriptase may be suitably used in the subject methods and composition described herein.

[0535] One method of preparing variant RTs is by genetic modification (e.g., by modifying the DNA sequence of a wild-type reverse transcriptase). A number of methods are known in the art that permit the random as well as targeted mutation of DNA sequences (see for example, Ausubel et. al. Short Protocols in Molecular Biology (1995) 3.sup.rd Ed. John Wiley & Sons, Inc.). In addition, there are a number of commercially available kits for site-directed mutagenesis, including both conventional and PCR-based methods. Examples include the QuikChange Site-Directed Mutagenesis Kits (AGILENT®), the Q5® Site-Directed Mutagenesis Kit (NEW ENGLAND BIOLABS®), and GeneArt™ Site-Directed Mutagenesis System (THERMOFISHER SCIENTIFIC®).

[0536] In addition, mutant reverse transcriptases may be generated by insertional mutation or truncation (N-terminal, internal, or C-terminal insertions or truncations) according to methodologies known to one skilled in the art. The term “mutation,” as used herein, refers to a substitution of a residue within a sequence, e.g., a nucleic acid or amino acid sequence, with another residue, or a deletion or insertion of one or more residues within a sequence. Mutations are typically described herein by identifying the original residue followed by the position of the residue within the sequence and by the identity of the newly substituted residue. Various methods for making the amino acid substitutions (mutations) provided herein are well known in the art, and are provided by, for example, Green and Sambrook, Molecular Cloning: A Laboratory Manual (4th ed., Cold Spring Harbor Laboratory Press, Cold Spring Harbor, N.Y. (2012)). Mutations can include a variety of categories, such as single base polymorphisms, microduplication regions, indel, and inversions, and is not meant to be limiting in any way. Mutations can include “loss-of-function” mutations which is the normal result of a mutation that reduces or abolishes a protein activity. Most loss-of-function mutations are recessive, because in a heterozygote the second chromosome copy carries an unmutated version of the gene coding for a fully functional protein whose presence compensates for the effect of the mutation. Mutations also embrace “gain-of-function” mutations, which is one which confers an abnormal activity on a protein or cell that is otherwise not present in a normal condition. Many gain-of-function mutations are in regulatory sequences rather than in coding regions, and can therefore have a number of consequences. For example, a mutation might lead to one or more genes being expressed in the wrong tissues, these tissues gaining functions that they normally lack. Because of their nature, gain-of-function mutations are usually dominant.

[0537] Older methods of site-directed mutagenesis known in the art rely on sub-cloning of the sequence to be mutated into a vector, such as an M13 bacteriophage vector, that allows the isolation of single-stranded DNA template. In these methods, one anneals a mutagenic primer (i.e., a primer capable of annealing to the site to be mutated but bearing one or more mismatched nucleotides at the site to be mutated) to the single-stranded template and then polymerizes the complement of the template starting from the 3′ end of the mutagenic primer. The resulting duplexes are then transformed into host bacteria and plaques are screened for the desired mutation.

[0538] More recently, site-directed mutagenesis has employed PCR methodologies, which have the advantage of not requiring a single-stranded template. In addition, methods have been developed that do not require sub-cloning. Several issues must be considered when PCR-based site-directed mutagenesis is performed. First, in these methods it is desirable to reduce the number of PCR cycles to prevent expansion of undesired mutations introduced by the polymerase. Second, a selection must be employed in order to reduce the number of non-mutated parental molecules persisting in the reaction. Third, an extended-length PCR method is preferred in order to allow the use of a single PCR primer set. And fourth, because of the non-template-dependent terminal extension activity of some thermostable polymerases it is often necessary to incorporate an end-polishing step into the procedure prior to blunt-end ligation of the PCR-generated mutant product.

[0539] Methods of random mutagenesis, which will result in a panel of mutants bearing one or more randomly situated mutations, exist in the art. Such a panel of mutants may then be screened for those exhibiting the desired properties, for example, increased stability, relative to a wild-type reverse transcriptase.

[0540] An example of a method for random mutagenesis is the so-called “error-prone PCR method.” As the name implies, the method amplifies a given sequence under conditions in which the DNA polymerase does not support high fidelity incorporation. Although the conditions encouraging error-prone incorporation for different DNA polymerases vary, one skilled in the art may determine such conditions for a given enzyme. A key variable for many DNA polymerases in the fidelity of amplification is, for example, the type and concentration of divalent metal ion in the buffer. The use of manganese ion and/or variation of the magnesium or manganese ion concentration may therefore be applied to influence the error rate of the polymerase.

[0541] In various aspects, the RT of the multi-flap prime editors may be an “error-prone” reverse transcriptase variant. Error-prone reverse transcriptases that are known and/or available in the art may be used. It will be appreciated that reverse transcriptases naturally do not have any proofreading function; thus the error rate of reverse transcriptase is generally higher than DNA polymerases comprising a proofreading activity. The error-rate of any particular reverse transcriptase is a property of the enzyme's “fidelity,” which represents the accuracy of template-directed polymerization of DNA against its RNA template. An RT with high fidelity has a low-error rate. Conversely, an RT with low fidelity has a high-error rate. The fidelity of M-MLV-based reverse transcriptases are reported to have an error rate in the range of one error in 15,000 to 27,000 nucleotides synthesized. See Boutabout et al., “DNA synthesis fidelity by the reverse transcriptase of the yeast retrotransposon Tyl,” Nucleic Acids Res, 2001, 29: 2217-2222, which is incorporated by reference. Thus, for purposes of this application, those reverse transcriptases considered to be “error-prone” or which are considered to have an “error-prone fidelity” are those having an error rate that is less than one error in 15,000 nucleotides synthesized.

[0542] Error-prone reverse transcriptase also may be created through mutagenesis of a starting RT enzyme (e.g., a wild type M-MLV RT). The method of mutagenesis is not limited and may include directed evolution processes, such as phage-assisted continuous evolution (PACE) or phage-assisted noncontinuous evolution (PANCE). The term “phage-assisted continuous evolution (PACE),” as used herein, refers to continuous evolution that employs phage as viral vectors. The general concept of PACE technology has been described, for example, in International PCT Application, PCT/US2009/056194, filed September 8, 2009, published as WO 2010/028347 on March 11, 2010; International PCT Application, PCT/US2011/066747, filed December 22, 2011, published as WO 2012/088381 on June 28, 2012; U.S. Application, U.S. Patent No. 9,023,594, issued May 5, 2015, International PCT Application, PCT/US2015/012022, filed Jan. 20, 2015, published as WO 2015/134121 on Sep. 11, 2015, and International PCT Application, PCT/US2016/027795, filed April 15, 2016, published as WO 2016/168631 on Oct. 20, 2016, the entire contents of each of which are incorporated herein by reference.

[0543] Error-prone reverse transcriptases may also be obtain by phage-assisted non-continuous evolution (PANCE),” which as used herein, refers to non-continuous evolution that employs phage as viral vectors. PANCE is a simplified technique for rapid in vivo directed evolution using serial flask transfers of evolving ‘selection phage’ (SP), which contain a gene of interest to be evolved, across fresh E. coli host cells, thereby allowing genes inside the host E. coli to be held constant while genes contained in the SP continuously evolve. Serial flask transfers have long served as a widely-accessible approach for laboratory evolution of microbes, and, more recently, analogous approaches have been developed for bacteriophage evolution. The PANCE system features lower stringency than the PACE system.

[0544] Other error-prone reverse transcriptases have been described in the literature, each of which are contemplated for use in the herein methods and compositions. For example, error-prone reverse transcriptases have been described in Bebenek et al., “Error-prone Polymerization by HIV-1 Reverse Transcriptase,” J Biol Chem, 1993, Vol. 268: 10324-10334 and Sebastian-Martin et al., “Transcriptional inaccuracy threshold attenuates differences in RNA-dependent DNA synthesis fidelity between retroviral reverse transcriptases,” Scientific Reports, 2018, Vol. 8: 627, each of which are incorporated by reference. Still further, reverse transcriptases, including error-prone reverse transcriptases can be obtained from a commercial supplier, including ProtoScript® (II) Reverse Transcriptase, AMV Reverse Transcriptase, WarmStart® Reverse Transcriptase, and M-MuLV Reverse Transcriptase, all from NEW ENGLAND BIOLABS®, or AMV Reverse Transcriptase XL, SMARTScribe Reverse Transcriptase, GPR ultra-pure MMLV Reverse Transcriptase, all from TAKARA BIO USA, INC. (formerly CLONTECH).

[0545] The herein disclosure also contemplates reverse transcriptases having mutations in RNaseH domain As mentioned above, one of the intrinsic properties of reverse transcriptases is the RNase H activity, which cleaves the RNA template of the RNA:cDNA hybrid concurrently with polymerization. The RNase H activity can be undesirable for synthesis of long cDNAs because the RNA template may be degraded before completion of full-length reverse transcription. The RNase H activity may also lower reverse transcription efficiency, presumably due to its competition with the polymerase activity of the enzyme. Thus, the present disclosure contemplates any reverse transcriptase variants that comprise a modified RNaseH activity.

[0546] The herein disclosure also contemplates reverse transcriptases having mutations in the RNA-dependent DNA polymerase domain As mentioned above, one of the intrinsic properties of reverse transcriptases is the RNA-dependent DNA polymerase activity, which incorporates the nucleobases into the nascent cDNA strand as coded by the template RNA strand of the RNA:cDNA hybrid. The RNA-dependent DNA polymerase activity can be increased or decreased (i.e., in terms of its rate of incorporation) to either increase or decrease the processivity of the enzyme. Thus, the present disclosure contemplates any reverse transcriptase variants that comprise a modified RNA-dependent DNA polymerase activity such that the processivity of the enzyme of either increased or decreased relative to an unmodified version.

[0547] Also contemplated herein are reverse transcriptase variants that have altered thermostability characteristics. The ability of a reverse transcriptase to withstand high temperatures is an important aspect of cDNA synthesis. Elevated reaction temperatures help denature RNA with strong secondary structures and/or high GC content, allowing reverse transcriptases to read through the sequence. As a result, reverse transcription at higher temperatures enables full-length cDNA synthesis and higher yields, which can lead to an improved generation of the 3′ flap ssDNA as a result of the multi-flap prime editing process. Wild type M-MLV reverse transcriptase typically has an optimal temperature in the range of 37-48° C.; however, mutations may be introduced that allow for the reverse transcription activity at higher temperatures of over 48° C., including 49° C., 50° C., 51° C., 52° C., 53° C., 54° C., 55° C., 56° C., 57° C., 58° C., 59° C., 60° C., 61° C., 62° C., 63° C,64° C,65° C,66° C., and higher.

[0548] The variant reverse transcriptases contemplated herein, including error-prone RTs, thermostable RTs, increase-processivity RTs, can be engineered by various routine strategies, including mutagenesis or evolutionary processes. In some cases, the variants can be produced by introducing a single mutation. In other cases, the variants may require more than one mutation. For those mutants comprising more than one mutation, the effect of a given mutation may be evaluated by introduction of the identified mutation to the wild-type gene by site-directed mutagenesis in isolation from the other mutations borne by the particular mutant. Screening assays of the single mutant thus produced will then allow the determination of the effect of that mutation alone.

[0549] Variant RT enzymes used herein may also include other “RT variants” having at least about 70% identical, at least about 80% identical, at least about 90% identical, at least about 95% identical, at least about 96% identical, at least about 97% identical, at least about 98% identical, at least about 99% identical, at least about 99.5% identical, or at least about 99.9% identical to any reference RT protein, including any wild type RT, or mutant RT, or fragment RT, or other variant of RT disclosed or contemplated herein or known in the art.

[0550] In some embodiments, an RT variant may have 1, 2, 3, 4, 5, 6, 7, 8, 9, 10, 11, 12, 13, 14, 15, 16, 17, 18, 19, 20, 21, 22, 21, 24, 25, 26, 27, 28, 29, 30, 31, 32, 33, 34, 35, 36, 37, 38, 39, 40, 41, 42, 43, 44, 45, 46, 47, 48, 49, 50, or up to 100, or up to 200, or up to 300, or up to 400, or up to 500 or more amino acid changes compared to a reference RT. In some embodiments, the RT variant comprises a fragment of a reference RT, such that the fragment is at least about 70% identical, at least about 80% identical, at least about 90% identical, at least about 95% identical, at least about 96% identical, at least about 97% identical, at least about 98% identical, at least about 99% identical, at least about 99.5% identical, or at least about 99.9% identical to the corresponding fragment of the reference RT. In some embodiments, the fragment is is at least 30%, at least 35%, at least 40%, at least 45%, at least 50%, at least 55%, at least 60%, at least 65%, at least 70%, at least 75%, at least 80%, at least 85%, at least 90%, at least 95% identical, at least 96%, at least 97%, at least 98%, at least 99%, or at least 99.5% of the amino acid length of a corresponding wild type RT (M-MLV reverse transcriptase) (e.g., SEQ ID NO: 89) or to any of the reverse transcriptases of SEQ ID NOs: 90-100.

[0551] In some embodiments, the disclosure also may utilize RT fragments which retain their functionality and which are fragments of any herein disclosed RT proteins. In some embodiments, the RT fragment is at least 100 amino acids in length. In some embodiments, the fragment is at least 100, 150, 200, 250, 300, 350, 400, 450, 500, 550, or up to 600 or more amino acids in length.

[0552] In still other embodiments, the disclosure also may utilize RT variants which are truncated at the N-terminus or the C-terminus, or both, by a certain number of amino acids which results in a truncated variant which still retains sufficient polymerase function. In some embodiments, the RT truncated variant has a truncation of at least 1, at least 2, at least 3, at least 4, at least 5, at least 6, at least 7, at least 8, at least 9, at least 10, at least 11, at least 12, at least 13, at least 14, at least 15, at least 16, at least 17, at least 18, at least 19, at least 20, at least 21, at least 22, at least 23, at least 24, at least 25, at least 30, 40, 50, 60, 70, 80, 90, 100, 110, 120, 130, 140, 150, 160, 170, 180, 190, 200, 210, 220, 230, 240, or 250 amino acids at the N-terminal end of the protein. In other embodiments, the RT truncated variant has a truncation of at least 1, at least 2, at least 3, at least 4, at least 5, at least 6, at least 7, at least 8, at least 9, at least 10, at least 11, at least 12, at least 13, at least 14, at least 15, at least 16, at least 17, at least 18, at least 19, at least 20, at least 21, at least 22, at least 23, at least 24, at least 25, at least 30, 40, 50, 60, 70, 80, 90, 100, 110, 120, 130, 140, 150, 160, 170, 180, 190, 200, 210, 220, 230, 240, or 250 amino acids at the C-terminal end of the protein. In still other embodiments, the RT truncated variant has a trunction at the N-terminal and the C-terminal end which are the same or different lengths.

[0553] For example, the multi-flap prime editors disclosed herein may include a truncated version of M-MLV reverse transcriptase. In this embodiment, the reverse transcriptase contains 4 mutations (D200N, T306K, W313F, T330P; noting that the L603W mutation present in PE2 is no longer present due to the truncation). The DNA sequence encoding this truncated editor is 522 bp smaller than PE2, and therefore makes its potentially useful for applications where delivery of the DNA sequence is challenging due to its size (i.e., adeno-associated virus and lentivirus delivery). This embodiment is referred to as MMLV-RT(trunc) and has the following amino acid sequence:

| | |
|---|---|
| MMLV-RT(TRUNC) | TLNIEDEYRLHETSKEPDVSLGSTWLSDFPQAWAETGGMGLAVRQAPLIIP |
| | LKATSTPVSIKQYPMSQEARLGIKPHIQRLLDQGILVPCQSPWNTPLLPVK |
| | KPGTNDYRPVQDLREVNKRVEDIHPTVPNPYNLLSGLPPSHQWYTVLDLK |
| | DAFFCLRLHPTSQPLFAFEWRDPEMGISGQLTWTRLPQGFKNSPTLFNEA |
| | LHRDLADFRIQHPDLILLQYVDDLLLAATSELDCQQGTRALLQTLGNLGY |
| | RASAKKAQICQKQVKYLGYLLKEGQRWLTEARKETVMGQPTPKTPRQLR |
| | EFLGKAGFCRLFIPGFAEMAAPLYPLTKPGTLFNWGPDQQKAYQEIKQA |
| | LLTAPALGLPDLTKPFELFVDEKQGYAKGVLTQKLGPWRRPVAYLSKKLD |
| | PVAAGWPPCLRMVAAIAVLTKDAGKLTMGQPLVILAPHAVEALVKQPPD |
| | RWLSNARMTHYQALLLDTDRVQFGPWALNPATLLPLPEEGLQHNCLDN |
| | SRLIN (SEQ ID NO: 766) |

[0554] In various embodiments, the multi-flap prime editors disclosed herein may comprise one of the RT variants described herein, or a RT variant thereof having at least about 70% identical, at least about 80% identical, at least about 90% identical, at least about 95% identical, at least about 96% identical, at least about 97% identical, at least about 98% identical, at least about 99% identical, at least about 99.5% identical, or at least about 99.9% identical to any reference Cas9 variants.

[0555] In still other embodiments, the present methods and compositions may utilize a DNA polymerase that has been evolved into a reverse transcriptase, as described in Effefson et al., “Synthetic evolutionary origin of a proofreading reverse transcriptase,” Science, June 24, 2016, Vol. 352: 1590-1593, the contents of which are incorporated herein by reference.

[0556] In certain other embodiments, the reverse transcriptase is provided as a component of a fusion protein also comprising a napDNAbp. In other words, in some embodiments, the reverse transcriptase is fused to a napDNAbp as a fusion protein.

[0557] In various embodiments, variant reverse transcriptases can be engineered from wild type M-MLV reverse transcriptase as represented by SEQ ID NO: 89.

[0558] In various embodiments, the multi-flap prime editors described herein (with RT provided as either a fusion partner or in trans) can include a variant RT comprising one or more of the following mutations: P51L, S67K, E69K, L139P, T197A, D200N, H204R, F209N, E302K, E302R, T306K, F309N, W313F, T330P, L345G, L435G, N454K, D524G, E562Q, D583N, H594Q, L603W, E607K, or D653N in the wild type M-MLV RT of SEQ ID NO: 89 or at a corresponding amino acid position in another wild type RT polypeptide sequence.

[0559] Some exemplary reverse transcriptases that can be fused to napDNAbp proteins or provided as individual proteins according to various embodiments of this disclosure are provided below. Exemplary reverse transcriptases include variants with at least 80%, at least 85%, at least 90%, at least 95%, or at least 99% sequence identity to the following wild-type enzymes or partial enzymes:

| Description | Sequence (variant substitutions relative to wild type) |
|---|---|
| Reverse | TLNIEDEYRLHETSKEPDVSLGSTWLSDFPQAWAETGGMGLAVRQAPLIIPLK |
| transcriptase | ATSTPVSIKQYPMSQEARLGIKPHIQRLLDQGILVPCQSPWNTPLLPVKKPGTN |
| (M-MLV RT) | DYRPVQDLREVNKRVEDIHPTVPNPYNLLSGLPPSHQWYTVLDLKDAFFCLR |
| wild type | LHPTSQPLFAFEWRDPEMGISGQLTWTRLPQGFKNSPTLFDEALHRDLADFRI |
| moloney | QHPDLILLQYVDDLLLAATSELDCQQGTRALLQTLGNLGYRASAKKAQICQK |
| murine | QVKYLGYLLKEGQRWLTEARKETVMGQPTPKTPRQLREFLGTAGFCRLWIP |
| leukemia virus | GFAEMAAPLYPLTKTGTLFNWGPDQQKAYQEIKQALLTAPALGLPDLTKPFE |
| Used in PE1 | LFVDEKQGYAKGVLTQKLGPWRRPVAYLSKKLDPVAAGWPPCLRMVAAIA |
| (prime editor 1 | VLTKDAGKLTMGQPLVILAPHAVEALVKQPPDRWLSNARMTHYQALLLDTD |
| fusion protein | RVQFGPVVALNPATLLPLPEEGLQHNCLDILAEAHGTRPDLTDQPLPDADHT |
| disclosed | WYTDGSSLLQEGQRKAGAAVTTETEVIWAKALPAGTSAQRAELIALTQALK |
| herein) | MAEGKKLNVYTDSRYAFATAHIHGEIYRRRGLLTSEGKEIKNKDEILALLKAL |
| | FLPKRLSIIHCPGHQKGHSAEARGNRMADQAARKAAITETPDTSTLLIENSSP |
| | (SEQ ID NO: 89) |
| M-MLV RT | TLNIEDEYRLHETSKEPDVSLGSTWLSDFPQAWAETGGMGLAVRQAPLIIPLK |
| D200N | ATSTPVSIKQYPMSQEARLGIKPHIQRLLDQGILVPCQSPWNTPLLPVKKPGTN |
| | DYRPVQDLREVNKRVEDIHPTVPNPYNLLSGLPPSHQWYTVLDLKDAFFCLR |
| | LHPTSQPLFAFEWRDPEMGISGQLTWTRLPQGFKNSPTLFNEALHRDLADFRI |
| | QHPDLILLQYVDDLLLAATSELDCQQGTRALLQTLGNLGYRASAKKAQICQK |
| | QVKYLGYLLKEGQRWLTEARKETVMGQPTPKTPRQLREFLGTAGFCRLWIP |
| | GFAEMAAPLYPLTKTGTLFNWGPDQQKAYQEIKQALLTAPALGLPDLTKPFE |
| | LFVDEKQGYAKGVLTQKLGPWRRPVAYLSKKLDPVAAGWPPCLRMVAAIA |
| | VLTKDAGKLTMGQPLVILAPHAVEALVKQPPDRWLSNARMTHYQALLLDTD |
| | RVQFGPVVALNPATLLPLPEEGLQHNCLDILAEAHGTRPDLTDQPLPDADHT |
| | WYTDGSSLLQEGQRKAGAAVTTETEVIWAKALPAGTSAQRAELIALTQALK |
| | MAEGKKLNVYTDSRYAFATAHIHGEIYRRRGLLTSEGKEIKNKDEILALLKAL |
| | FLPKRLSIIHCPGHQKGHSAEARGNRMADQAARKAAITETPDTSTLLIENSSP |
| | (SEQ ID NO: 701) |
| M-MLV RT | TLNIEDEYRLHETSKEPDVSLGSTWLSDFPQAWAETGGMGLAVRQAPLIIPLK |
| D200N | ATSTPVSIKQYPMSQEARLGIKPHIQRLLDQGILVPCQSPWNTPLLPVKKPGTN |
| T330P | DYRPVQDLREVNKRVEDIHPTVPNPYNLLSGLPPSHQWYTVLDLKDAFFCLR |
| | LHPTSQPLFAFEWRDPEMGISGQLTWTRLPQGFKNSPTLFNEALHRDLADFRI |
| | QHPDLILLQYVDDLLLAATSELDCQQGTRALLQTLGNLGYRASAKKAQICQK |
| | QVKYLGYLLKEGQRWLTEARKETVMGQPTPKTPRQLREFLGTAGFCRLWIP |
| | GFAEMAAPLYPLTKPGTLFNWGPDQQKAYQEIKQALLTAPALGLPDLTKPFE |
| | LFVDEKQGYAKGVLTQKLGPWRRPVAYLSKKLDPVAAGWPPCLRMVAAIA |
| | VLTKDAGKLTMGQPLVILAPHAVEALVKQPPDRWLSNARMTHYQALLLDTD |
| | RVQFGPVVALNPATLLPLPEEGLQHNCLDILAEAHGTRPDLTDQPLPDADHT |
| | WYTDGSSLLQEGQRKAGAAVTTETEVIWAKALPAGTSAQRAELIALTQALK |
| | MAEGKKLNVYTDSRYAFATAHIHGEIYRRRGLLTSEGKEIKNKDEILALLKAL |
| | FLPKRLSIIHCPGHQKGHSAEARGNRMADQAARKAAITETPDTSTLLIENSSP |
| | (SEQ ID NO: 702) |
| M-MLV RT | TLNIEDEYRLHETSKEPDVSLGSTWLSDFPQAWAETGGMGLAVRQAPLIIPLK |
| D200N | ATSTPVSIKQYPMSQEARLGIKPHIQRLLDQGILVPCQSPWNTPLLPVKKPGTN |
| T330P | DYRPVQDLREVNKRVEDIHPTVPNPYNLLSGLPPSHQWYTVLDLKDAFFCLR |
| L603W | LHPTSQPLFAFEWRDPEMGISGQLTWTRLPQGFKNSPTLFNEALHRDLADFRI |
| | QHPDLILLQYVDDLLLAATSELDCQQGTRALLQTLGNLGYRASAKKAQICQK |
| | QVKYLGYLLKEGQRWLTEARKETVMGQPTPKTPRQLREFLGTAGFCRLWIP |
| | GFAEMAAPLYPLTKPGTLFNWGPDQQKAYQEIKQALLTAPALGLPDLTKPFE |
| | LFVDEKQGYAKGVLTQKLGPWRRPVAYLSKKLDPVAAGWPPCLRMVAAIA |
| | VLTKDAGKLTMGQPLVILAPHAVEALVKQPPDRWLSNARMTHYQALLLDTD |
| | RVQFGPVVALNPATLLPLPEEGLQHNCLDILAEAHGTRPDLTDQPLPDADHT |
| | WYTDGSSLLQEGQRKAGAAVTTETEVIWAKALPAGTSAQRAELIALTQALK |
| | MAEGKKLNVYTDSRYAFATAHIHGEIYRRRGWLTSEGKEIKNKDEILALLKA |
| | LFLPKRLSIIHCPGHQKGHSAEARGNRMADQAARKAAITETPDTSTLLIENSSP |
| | (SEQ ID NO: 740) |
| M-MLV RT | TLNIEDEYRLHETSKEPDVSLGSTWLSDFPQAWAETGGMGLAVRQAPLIIPLK |
| D200N | ATSTPVSIKQYPMSQKARLGIKPHIQRLLDQGILVPCQSPWNTPLLPVKKPGTN |
| T330P | DYRPVQDLREVNKRVEDIHPTVPNPYNLLSGLPPSHQWYTVLDLKDAFFCLR |
| L603W | LHPTSQPLFAFEWRDPEMGISGQLTWTRLPQGFKNSPTLFNEALHRDLADFRI |
| E69K | QHPDLILLQYVDDLLLAATSELDCQQGTRALLQTLGNLGYRASAKKAQICQK |
| | QVKYLGYLLKEGQRWLTEARKETVMGQPTPKTPRQLREFLGTAGFCRLWIP |
| | GFAEMAAPLYPLTKPGTLFNWGPDQQKAYQEIKQALLTAPALGLPDLTKPFE |
| | LFVDEKQGYAKGVLTQKLGPWRRPVAYLSKKLDPVAAGWPPCLRMVAAIA |
| | VLTKDAGKLTMGQPLVILAPHAVEALVKQPPDRWLSNARMTHYQALLLDTD |
| | RVQFGPVVALNPATLLPLPEEGLQHNCLDILAEAHGTRPDLTDQPLPDADHT |
| | WYTDGSSLLQEGQRKAGAAVTTETEVIWAKALPAGTSAQRAELIALTQALK |
| | MAEGKKLNVYTDSRYAFATAHIHGEIYRRRGWLTSEGKEIKNKDEILALLKA |
| | LFLPKRLSIIHCPGHQKGHSAEARGNRMADQAARKAAITETPDTSTLLIENSSP |
| | (SEQ ID NO: 703) |
| M-MLV RT | TLNIEDEYRLHETSKEPDVSLGSTWLSDFPQAWAETGGMGLAVRQAPLIIPLK |
| D200N | atstpvsikqypmsqearlgikphiqrlldqgilvpcqspwntpllpvkkpgtn |
| T330P | DYRPVQDLREVNKRVEDIHPTVPNPYNLLSGLPPSHQWYTVLDLKDAFFCLR |
| L603W | LHPTSQPLFAFEWRDPEMGISGQLTWTRLPQGFKNSPTLFNEALHRDLADFRI |
| E302R | QHPDLILLQYVDDLLLAATSELDCQQGTRALLQTLGNLGYRASAKKAQICQK |
| | QVKYLGYLLKEGQRWLTEARKETVMGQPTPKTPRQLRRFLGTAGFCRLWIP |
| | GFAEMAAPLYPLTKPGTLFNWGPDQQKAYQEIKQALLTAPALGLPDLTKPFE |
| | LFVDEKQGYAKGVLTQKLGPWRRPVAYLSKKLDPVAAGWPPCLRMVAAIA |
| | VLTKDAGKLTMGQPLVILAPHAVEALVKQPPDRWLSNARMTHYQALLLDTD |
| | RVQFGPVVALNPATLLPLPEEGLQHNCLDILAEAHGTRPDLTDQPLPDADHT |
| | WYTDGSSLLQEGQRKAGAAVTTETEVIWAKALPAGTSAQRAELIALTQALK |
| | MAEGKKLNVYTDSRYAFATAHIHGEIYRRRGWLTSEGKEIKNKDEILALLKA |
| | LFLPKRLSIIHCPGHQKGHSAEARGNRMADQAARKAAITETPDTSTLLIENSSP |
| | (SEQ ID NO: 704) |
| M-MLV RT | TLNIEDEYRLHETSKEPDVSLGSTWLSDFPQAWAETGGMGLAVRQAPLIIPLK |
| D200N | ATSTPVSIKQYPMSQEARLGIKPHIQRLLDQGILVPCQSPWNTPLLPVKKPGTN |
| T330P | DYRPVQDLREVNKRVEDIHPTVPNPYNLLSGLPPSHQWYTVLDLKDAFFCLR |
| L603W | LHPTSQPLFAFEWRDPEMGISGQLTWTRLPQGFKNSPTLFNEALHRDLADFRI |
| E607K | QHPDLILLQYVDDLLLAATSELDCQQGTRALLQTLGNLGYRASAKKAQICQK |
| | QVKYLGYLLKEGQRWLTEARKETVMGQPTPKTPRQLREFLGTAGFCRLWIP |
| | GFAEMAAPLYPLTKPGTLFNWGPDQQKAYQEIKQALLTAPALGLPDLTKPFE |
| | LFVDEKQGYAKGVLTQKLGPWRRPVAYLSKKLDPVAAGWPPCLRMVAAIA |
| | VLTKDAGKLTMGQPLVILAPHAVEALVKQPPDRWLSNARMTHYQALLLDTD |
| | RVQFGPVVALNPATLLPLPEEGLQHNCLDILAEAHGTRPDLTDQPLPDADHT |
| | WYTDGSSLLQEGQRKAGAAVTTETEVIWAKALPAGTSAQRAELIALTQALK |
| | MAEGKKLNVYTDSRYAFATAHIHGEIYRRRGWLTSKGKEIKNKDEILALLKA |
| | LFLPKRLSIIHCPGHQKGHSAEARGNRMADQAARKAAITETPDTSTLLIENSSP |
| | (SEQ ID NO: 705) |
| M-MLV RT | TLNIEDEYRLHETSKEPDVSLGSTWLSDFPQAWAETGGMGLAVRQAPLIIPLK |
| D200N | ATSTPVSIKQYPMSQEARLGIKPHIQRLLDQGILVPCQSPWNTPLLPVKKPGTN |
| T330P | DYRPVQDLREVNKRVEDIHPTVPNPYNLLSGPPPSHQWYTVLDLKDAFFCLR |
| L603W | LHPTSQPLFAFEWRDPEMGISGQLTWTRLPQGFKNSPTLFNEALHRDLADFRI |
| L139P | QHPDLILLQYVDDLLLAATSELDCQQGTRALLQTLGNLGYRASAKKAQICQK |
| | QVKYLGYLLKEGQRWLTEARKETVMGQPTPKTPRQLREFLGTAGFCRLWIP |
| | GFAEMAAPLYPLTKPGTLFNWGPDQQKAYQEIKQALLTAPALGLPDLTKPFE |
| | LFVDEKQGYAKGVLTQKLGPWRRPVAYLSKKLDPVAAGWPPCLRMVAAIA |
| | VLTKDAGKLTMGQPLVILAPHAVEALVKQPPDRWLSNARMTHYQALLLDTD |
| | RVQFGPVVALNPATLLPLPEEGLQHNCLDILAEAHGTRPDLTDQPLPDADHT |
| | WYTDGSSLLQEGQRKAGAAVTTETEVIWAKALPAGTSAQRAELIALTQALK |
| | MAEGKKLNVYTDSRYAFATAHIHGEIYRRRGWLTSEGKEIKNKDEILALLKA |
| | LFLPKRLSIIHCPGHQKGHSAEARGNRMADQAARKAAITETPDTSTLLIENSSP |
| | (SEQ ID NO: 706) |
| M-MLV RT | TLNIEDEYRLHETSKEPDVSLGSTWLSDFPQAWAETGGMGLAVRQAPLIIPLK |
| D200N | ATSTPVSIKQYPMSQEARLGIKPHIQRLLDQGILVPCQSPWNTPLLPVKKPGTN |
| T330P | DYRPVQDLREVNKRVEDIHPTVPNPYNLLSGLPPSHQWYTVLDLKDAFFCLR |
| L603W | LHPTSQPLFAFEWRDPEMGISGQLTWTRLPQGFKNSPTLFNEALHRDLADFRI |
| L435G | QHPDLILLQYVDDLLLAATSELDCQQGTRALLQTLGNLGYRASAKKAQICQK |
| | QVKYLGYLLKEGQRWLTEARKETVMGQPTPKTPRQLREFLGTAGFCRLWIP |
| | GFAEMAAPLYPLTKPGTLFNWGPDQQKAYQEIKQALLTAPALGLPDLTKPFE |
| | LFVDEKQGYAKGVLTQKLGPWRRPVAYLSKKLDPVAAGWPPCLRMVAAIA |
| | VLTKDAGKLTMGQPLVIGAPHAVEALVKQPPDRWLSNARMTHYQALLLDT |
| | DRVQFGPVVALNPATLLPLPEEGLQHNCLDILAEAHGTRPDLTDQPLPDADHT |
| | WYTDGSSLLQEGQRKAGAAVTTETEVIWAKALPAGTSAQRAELIALTQALK |
| | MAEGKKLNVYTDSRYAFATAHIHGEIYRRRGWLTSEGKEIKNKDEILALLKA |
| | LFLPKRLSIIHCPGHQKGHSAEARGNRMADQAARKAAITETPDTSTLLIENSSP |
| | (SEQ ID NO: 707) |
| M-MLV RT | TLNIEDEYRLHETSKEPDVSLGSTWLSDFPQAWAETGGMGLAVRQAPLIIPLK |
| D200N | ATSTPVSIKQYPMSQEARLGIKPHIQRLLDQGILVPCQSPWNTPLLPVKKPGTN |
| T330P | DYRPVQDLREVNKRVEDIHPTVPNPYNLLSGLPPSHQWYTVLDLKDAFFCLR |
| L603W | LHPTSQPLFAFEWRDPEMGISGQLTWTRLPQGFKNSPTLFNEALHRDLADFRI |
| N454K | QHPDLILLQYVDDLLLAATSELDCQQGTRALLQTLGNLGYRASAKKAQICQK |
| | QVKYLGYLLKEGQRWLTEARKETVMGQPTPKTPRQLREFLGTAGFCRLWIP |
| | GFAEMAAPLYPLTKPGTLFNWGPDQQKAYQEIKQALLTAPALGLPDLTKPFE |
| | LFVDEKQGYAKGVLTQKLGPWRRPVAYLSKKLDPVAAGWPPCLRMVAAIA |
| | VLTKDAGKLTMGQPLVILAPHAVEALVKQPPDRWLSKARMTHYQALLLDTD |
| | RVQFGPVVALNPATLLPLPEEGLQHNCLDILAEAHGTRPDLTDQPLPDADHT |
| | WYTDGSSLLQEGQRKAGAAVTTETEVIWAKALPAGTSAQRAELIALTQALK |
| | MAEGKKLNVYTDSRYAFATAHIHGEIYRRRGWLTSEGKEIKNKDEILALLKA |
| | LFLPKRLSIIHCPGHQKGHSAEARGNRMADQAARKAAITETPDTSTLLIENSSP |
| | (SEQ ID NO: 708) |
| M-MLV RT | TLNIEDEYRLHETSKEPDVSLGSTWLSDFPQAWAETGGMGLAVRQAPLIIPLK |
| D200N | ATSTPVSIKQYPMSQEARLGIKPHIQRLLDQGILVPCQSPWNTPLLPVKKPGTN |
| T330P | DYRPVQDLREVNKRVEDIHPTVPNPYNLLSGLPPSHQWYTVLDLKDAFFCLR |
| L603W | LHPTSQPLFAFEWRDPEMGISGQLTWTRLPQGFKNSPTLFNEALHRDLADFRI |
| T306K | QHPDLILLQYVDDLLLAATSELDCQQGTRALLQTLGNLGYRASAKKAQICQK |
| | QVKYLGYLLKEGQRWLTEARKETVMGQPTPKTPRQLREFLGKAGFCRLWIP |
| | GFAEMAAPLYPLTKPGTLFNWGPDQQKAYQEIKQALLTAPALGLPDLTKPFE |
| | LFVDEKQGYAKGVLTQKLGPWRRPVAYLSKKLDPVAAGWPPCLRMVAAIA |
| | VLTKDAGKLTMGQPLVILAPHAVEALVKQPPDRWLSNARMTHYQALLLDTD |
| | RVQFGPVVALNPATLLPLPEEGLQHNCLDILAEAHGTRPDLTDQPLPDADHT |
| | WYTDGSSLLQEGQRKAGAAVTTETEVIWAKALPAGTSAQRAELIALTQALK |
| | MAEGKKLNVYTDSRYAFATAHIHGEIYRRRGWLTSEGKEIKNKDEILALLKA |
| | LFLPKRLSIIHCPGHQKGHSAEARGNRMADQAARKAAITETPDTSTLLIENSSP |
| | (SEQ ID NO: 709) |
| M-MLV RT | TLNIEDEYRLHETSKEPDVSLGSTWLSDFPQAWAETGGMGLAVRQAPLIIPLK |
| D200N | ATSTPVSIKQYPMSQEARLGIKPHIQRLLDQGILVPCQSPWNTPLLPVKKPGTN |
| T330P | DYRPVQDLREVNKRVEDIHPTVPNPYNLLSGLPPSHQWYTVLDLKDAFFCLR |
| L603W | LHPTSQPLFAFEWRDPEMGISGQLTWTRLPQGFKNSPTLFNEALHRDLADFRI |
| W313F | QHPDLILLQYVDDLLLAATSELDCQQGTRALLQTLGNLGYRASAKKAQICQK |
| | QVKYLGYLLKEGQRWLTEARKETVMGQPTPKTPRQLREFLGTAGFCRLFIPG |
| | FAEMAAPLYPLTKPGTLFNWGPDQQKAYQEIKQALLTAPALGLPDLTKPFEL |
| | FVDEKQGYAKGVLTQKLGPWRRPVAYLSKKLDPVAAGWPPCLRMVAAIAV |
| | LTKDAGKLTMGQPLVILAPHAVEALVKQPPDRWLSNARMTHYQALLLDTDR |
| | VQFGPVVALNPATLLPLPEEGLQHNCLDILAEAHGTRPDLTDQPLPDADHTW |
| | YTDGSSLLQEGQRKAGAAVTTETEVIWAKALPAGTSAQRAELIALTQALKMA |
| | EGKKLNVYTDSRYAFATAHIHGEIYRRRGWLTSEGKEIKNKDEILALLKALFL |
| | PKRLSIIHCPGHQKGHSAEARGNRMADQAARKAAITETPDTSTLLIENSSP |
| | (SEQ ID NO: 710) |
| M-MLV RT | TLNIEDEYRLHETSKEPDVSLGSTWLSDFPQAWAETGGMGLAVRQAPLIIPLK |
| D200N | ATSTPVSIKQYPMSQEARLGIKPHIQRLLDQGILVPCQSPWNTPLLPVKKPGTN |
| T330P | DYRPVQDLREVNKRVEDIHPTVPNPYNLLSGLPPSHQWYTVLDLKDAFFCLR |
| L603W | LHPTSQPLFAFEWRDPEMGISGQLTWTRLPQGFKNSPTLFNEALHRDLADFRI |
| D524G | QHPDLILLQYVDDLLLAATSELDCQQGTRALLQTLGNLGYRASAKKAQICQK |
| E562Q | QVKYLGYLLKEGQRWLTEARKETVMGQPTPKTPRQLREFLGTAGFCRLWIP |
| D583N | GFAEMAAPLYPLTKPGTLFNWGPDQQKAYQEIKQALLTAPALGLPDLTKPFE |
| | LFVDEKQGYAKGVLTQKLGPWRRPVAYLSKKLDPVAAGWPPCLRMVAAIA |
| | VLTKDAGKLTMGQPLVILAPHAVEALVKQPPDRWLSNARMTHYQALLLDTD |
| | RVQFGPVVALNPATLLPLPEEGLQHNCLDILAEAHGTRPDLTDQPLPDADHT |
| | WYTGGSSLLQEGQRKAGAAVTTETEVIWAKALPAGTSAQRAQLIALTQALK |
| | MAEGKKLNVYTNSRYAFATAHIHGEIYRRRGWLTSEGKEIKNKDEILALLKA |
| | LFLPKRLSIIHCPGHQKGHSAEARGNRMADQAARKAAITETPDTSTLLIENSSP |
| | (SEQ ID NO: 711) |
| M-MLV RT | TLNIEDEYRLHETSKEPDVSLGSTWLSDFPQAWAETGGMGLAVRQAPLIIPLK |
| D200N | ATSTPVSIKQYPMSQEARLGIKPHIQRLLDQGILVPCQSPWNTPLLPVKKPGTN |
| T330P | DYRPVQDLREVNKRVEDIHPTVPNPYNLLSGLPPSHQWYTVLDLKDAFFCLR |
| L603W | LHPTSQPLFAFEWRDPEMGISGQLTWTRLPQGFKNSPTLFNEALHRDLADFRI |
| E302R | QHPDLILLQYVDDLLLAATSELDCQQGTRALLQTLGNLGYRASAKKAQICQK |
| W313F | QVKYLGYLLKEGQRWLTEARKETVMGQPTPKTPRQLRRFLGTAGFCRLFIPG |
| | FAEMAAPLYPLTKPGTLFNWGPDQQKAYQEIKQALLTAPALGLPDLTKPFEL |
| | FVDEKQGYAKGVLTQKLGPWRRPVAYLSKKLDPVAAGWPPCLRMVAAIAV |
| | LTKDAGKLTMGQPLVILAPHAVEALVKQPPDRWLSNARMTHYQALLLDTDR |
| | VQFGPVVALNPATLLPLPEEGLQHNCLDILAEAHGTRPDLTDQPLPDADHTW |
| | YTDGSSLLQEGQRKAGAAVTTETEVIWAKALPAGTSAQRAELIALTQALKMA |
| | EGKKLNVYTDSRYAFATAHIHGEIYRRRGWLTSEGKEIKNKDEILALLKALFL |
| | PKRLSIIHCPGHQKGHSAEARGNRMADQAARKAAITETPDTSTLLIENSSP |
| | (SEQ ID NO: 712) |
| M-MLV RT | TLNIEDEYRLHETSKEPDVSLGSTWLSDFPQAWAETGGMGLAVRQAPLIIPLK |
| D200N | ATSTPVSIKQYPMSQEARLGIKPHIQRLLDQGILVPCQSPWNTPLLPVKKPGTN |
| T330P | DYRPVQDLREVNKRVEDIHPTVPNPYNLLSGPPPSHQWYTVLDLKDAFFCLR |
| L603W | LHPTSQPLFAFEWRDPEMGISGQLTWTRLPQGFKNSPTLFNEALHRDLADFRI |
| E607K | QHPDLILLQYVDDLLLAATSELDCQQGTRALLQTLGNLGYRASAKKAQICQK |
| L139P | QVKYLGYLLKEGQRWLTEARKETVMGQPTPKTPRQLREFLGTAGFCRLWIP |
| | GFAEMAAPLYPLTKPGTLFNWGPDQQKAYQEIKQALLTAPALGLPDLTKPFE |
| | LFVDEKQGYAKGVLTQKLGPWRRPVAYLSKKLDPVAAGWPPCLRMVAAIA |
| | VLTKDAGKLTMGQPLVILAPHAVEALVKQPPDRWLSNARMTHYQALLLDTD |
| | RVQFGPVVALNPATLLPLPEEGLQHNCLDILAEAHGTRPDLTDQPLPDADHT |
| | WYTDGSSLLQEGQRKAGAAVTTETEVIWAKALPAGTSAQRAELIALTQALK |
| | MAEGKKLNVYTDSRYAFATAHIHGEIYRRRGWLTSKGKEIKNKDEILALLKA |
| | LFLPKRLSIIHCPGHQKGHSAEARGNRMADQAARKAAITETPDTSTLLIENSSP |
| | (SEQ ID NO: 713) |
| M-MLV RT | TLNIEDEYRLHETSKEPDVSLGSTWLSDFPQAWAETGGMGLAVRQAPLIILLK |
| P51L S67K | ATSTPVSIKQYPMKQEARLGIKPHIQRLLDQGILVPCQSPWNTPLLPVKKPGT |
| T197A H204R | NDYRPVQDLREVNKRVEDIHPTVPNPYNLLSGLPPSHQWYTVLDLKDAFFCL |
| E302K F309N | RLHPTSQPLFAFEWRDPEMGISGQLTWTRLPQGFKNSPALFDEALRRDLADFR |
| W313F T330P | IQHPDLILLQYVDDLLLAATSELDCQQGTRALLQTLGNLGYRASAKKAQICQ |
| L435G N454K | KQVKYLGYLLKEGQRWLTEARKETVMGQPTPKTPRQLRKFLGTAGNCRLFI |
| D524G D583N | PGFAEMAAPLYPLTKPGTLFNWGPDQQKAYQEIKQALLTAPALGLPDLTKPF |
| H594Q D653N | ELFVDEKQGYAKGVLTQKLGPWRRPVAYLSKKLDPVAAGWPPCLRMVAAI |
| | AVLTKDAGKLTMGQPLVIGAPHAVEALVKQPPDRWLSKARMTHYQALLLD |
| | TDRVQFGPVVALNPATLLPLPEEGLQHNCLDILAEAHGTRPDLTDQPLPDADH |
| | TWYTGGSSLLQEGQRKAGAAVTTETEVIWAKALPAGTSAQRAELIALTQALK |
| | MAEGKKLNVYTNSRYAFATAHIQGEIYRRRGLLTSEGKEIKNKDEILALLKAL |
| | FLPKRLSIIHCPGHQKGHSAEARGNRMANQAARKAAITETPDTSTLLIENSSP |
| | (SEQ ID NO: 714) |
| M-MLV RT | TLNIEDEYRLHETSKEPDVSLGSTWLSDFPQAWAETGGMGLAVRQAPLIILLK |
| D200N P51L | ATSTPVSIKQYPMKQEARLGIKPHIQRLLDQGILVPCQSPWNTPLLPVKKPGT |
| S67K T197A | NDYRPVQDLREVNKRVEDIHPTVPNPYNLLSGLPPSHQWYTVLDLKDAFFCL |
| H204R E302K | RLHPTSQPLFAFEWRDPEMGISGQLTWTRLPQGFKNSPALFNEALRRDLADFR |
| F309N W313F | IQHPDLILLQYVDDLLLAATSELDCQQGTRALLQTLGNLGYRASAKKAQICQ |
| T330P L345G | KQVKYLGYLLKEGQRWLTEARKETVMGQPTPKTPRQLRKFLGTAGNCRLFI |
| N454K D524G | PGFAEMAAPLYPLTKPGTLFNWGPDQQKAYQEIKQALLTAPALGLPDLTKPF |
| D583N H594Q | ELFVDEKQGYAKGVLTQKLGPWRRPVAYLSKKLDPVAAGWPPCLRMVAAI |
| D653N | AVLTKDAGKLTMGQPLVIGAPHAVEALVKQPPDRWLSKARMTHYQALLLD |
| | TDRVQFGPVVALNPATLLPLPEEGLQHNCLDILAEAHGTRPDLTDQPLPDADH |
| | TWYTGGSSLLQEGQRKAGAAVTTETEVIWAKALPAGTSAQRAELIALTQALK |
| | MAEGKKLNVYTNSRYAFATAHIQGEIYRRRGLLTSEGKEIKNKDEILALLKAL |
| | FLPKRLSIIHCPGHQKGHSAEARGNRMANQAARKAAITETPDTSTLLIENSSP |
| | (SEQ ID NO: 715) |
| M-MLV RT | TLNIEDEYRLHETSKEPDVSLGSTWLSDFPQAWAETGGMGLAVRQAPLIIPLK |
| D200N T330P | ATSTPVSIKQYPMSQEARLGIKPHIQRLLDQGILVPCQSPWNTPLLPVKKPGTN |
| L603W T306K | DYRPVQDLREVNKRVEDIHPTVPNPYNLLSGLPPSHQWYTVLDLKDAFFCLR |
| W313F | LHPTSQPLFAFEWRDPEMGISGQLTWTRLPQGFKNSPTLFNEALHRDLADFRI |
| in PE2 | QHPDLILLQYVDDLLLAATSELDCQQGTRALLQTLGNLGYRASAKKAQICQK |
| | QVKYLGYLLKEGQRWLTEARKETVMGQPTPKTPRQLREFLGKAGFCRLFIPG |
| | FAEMAAPLYPLTKPGTLFNWGPDQQKAYQEIKQALLTAPALGLPDLTKPFEL |
| | FVDEKQGYAKGVLTQKLGPWRRPVAYLSKKLDPVAAGWPPCLRMVAAIAV |
| | LTKDAGKLTMGQPLVILAPHAVEALVKQPPDRWLSNARMTHYQALLLDTDR |
| | VQFGPVVALNPATLLPLPEEGLQHNCLDILAEAHGTRPDLTDQPLPDADHTW |
| | YTDGSSLLQEGQRKAGAAVTTETEVIWAKALPAGTSAQRAELIALTQALKMA |
| | EGKKLNVYTDSRYAFATAHIHGEIYRRRGWLTSEGKEIKNKDEILALLKALFL |
| | PKRLSIIHCPGHQKGHSAEARGNRMADQAARKAAITETPDTSTLLIENSSP |
| | (SEQ ID NO: 716) |

[0560] In various other embodiments, the multi-flap prime editors described herein (with RT provided as either a fusion partner or in trans) can include a variant RT comprising one or more of the following mutations: P51X, S67X, E69X, L139X, T197X, D200X, H204X, F209X, E302X, T306X, F309X, W313X, T330X, L345X, L435X, N454X, D524X, E562X, D583X, H594X, L603X, E607X, or D653X in the wild type M-MLV RT of SEQ ID NO: 89 or at a corresponding amino acid position in another wild type RT polypeptide sequence, wherein “X” can be any amino acid.

[0561] In various other embodiments, the multi-flap prime editors described herein (with RT provided as either a fusion partner or in trans) can include a variant RT comprising a P51X mutation in the wild type M-MLV RT of SEQ ID NO: 89 or at a corresponding amino acid position in another wild type RT polypeptide sequence, wherein “X” can be any amino acid. In certain embodiments, X is L.

[0562] In various other embodiments, the multi-flap prime editors described herein (with RT provided as either a fusion partner or in trans) can include a variant RT comprising a S67X mutation in the wild type M-MLV RT of SEQ ID NO: 89 or at a corresponding amino acid position in another wild type RT polypeptide sequence, wherein “X” can be any amino acid. In certain embodiments, X is K.

[0563] In various other embodiments, the multi-flap prime editors described herein (with RT provided as either a fusion partner or in trans) can include a variant RT comprising a E69X mutation in the wild type M-MLV RT of SEQ ID NO: 89 or at a corresponding amino acid position in another wild type RT polypeptide sequence, wherein “X” can be any amino acid. In certain embodiments, X is K.

[0564] In various other embodiments, the multi-flap prime editors described herein (with RT provided as either a fusion partner or in trans) can include a variant RT comprising a L139X mutation in the wild type M-MLV RT of SEQ ID NO: 89 or at a corresponding amino acid position in another wild type RT polypeptide sequence, wherein “X” can be any amino acid. In certain embodiments, X is P.

[0565] In various other embodiments, the multi-flap prime editors described herein (with RT provided as either a fusion partner or in trans) can include a variant RT comprising a T197X mutation in the wild type M-MLV RT of SEQ ID NO: 89 or at a corresponding amino acid position in another wild type RT polypeptide sequence, wherein “X” can be any amino acid. In certain embodiments, X is A.

[0566] In various other embodiments, the multi-flap prime editors described herein (with RT provided as either a fusion partner or in trans) can include a variant RT comprising a D200X mutation in the wild type M-MLV RT of SEQ ID NO: 89 or at a corresponding amino acid position in another wild type RT polypeptide sequence, wherein “X” can be any amino acid. In certain embodiments, X is N.

[0567] In various other embodiments, the multi-flap prime editors described herein (with RT provided as either a fusion partner or in trans) can include a variant RT comprising a H204X mutation in the wild type M-MLV RT of SEQ ID NO: 89 or at a corresponding amino acid position in another wild type RT polypeptide sequence, wherein “X” can be any amino acid. In certain embodiments, X is R.

[0568] In various other embodiments, the multi-flap prime editors described herein (with RT provided as either a fusion partner or in trans) can include a variant RT comprising a F209X mutation in the wild type M-MLV RT of SEQ ID NO: 89 or at a corresponding amino acid position in another wild type RT polypeptide sequence, wherein “X” can be any amino acid. In certain embodiments, X is N.

[0569] In various other embodiments, the multi-flap prime editors described herein (with RT provided as either a fusion partner or in trans) can include a variant RT comprising a E302X mutation in the wild type M-MLV RT of SEQ ID NO: 89 or at a corresponding amino acid position in another wild type RT polypeptide sequence, wherein “X” can be any amino acid. In certain embodiments, X is K.

[0570] In various other embodiments, the multi-flap prime editors described herein (with RT provided as either a fusion partner or in trans) can include a variant RT comprising a E302X mutation in the wild type M-MLV RT of SEQ ID NO: 89 or at a corresponding amino acid position in another wild type RT polypeptide sequence, wherein “X” can be any amino acid. In certain embodiments, X is R.

[0571] In various other embodiments, the multi-flap prime editors described herein (with RT provided as either a fusion partner or in trans) can include a variant RT comprising a T306X mutation in the wild type M-MLV RT of SEQ ID NO: 89 or at a corresponding amino acid position in another wild type RT polypeptide sequence, wherein “X” can be any amino acid. In certain embodiments, X is K.

[0572] In various other embodiments, the multi-flap prime editors described herein (with RT provided as either a fusion partner or in trans) can include a variant RT comprising a F309X mutation in the wild type M-MLV RT of SEQ ID NO: 89 or at a corresponding amino acid position in another wild type RT polypeptide sequence, wherein “X” can be any amino acid. In certain embodiments, X is N.

[0573] In various other embodiments, the multi-flap prime editors described herein (with RT provided as either a fusion partner or in trans) can include a variant RT comprising a W313X mutation in the wild type M-MLV RT of SEQ ID NO: 89 or at a corresponding amino acid position in another wild type RT polypeptide sequence, wherein “X” can be any amino acid. In certain embodiments, X is F.

[0574] In various other embodiments, the multi-flap prime editors described herein (with RT provided as either a fusion partner or in trans) can include a variant RT comprising a T330X mutation in the wild type M-MLV RT of SEQ ID NO: 89 or at a corresponding amino acid position in another wild type RT polypeptide sequence, wherein “X” can be any amino acid. In certain embodiments, X is P.

[0575] In various other embodiments, the multi-flap prime editors described herein (with RT provided as either a fusion partner or in trans) can include a variant RT comprising a L345X mutation in the wild type M-MLV RT of SEQ ID NO: 89 or at a corresponding amino acid position in another wild type RT polypeptide sequence, wherein “X” can be any amino acid. In certain embodiments, X is G.

[0576] In various other embodiments, the multi-flap prime editors described herein (with RT provided as either a fusion partner or in trans) can include a variant RT comprising a L435X mutation in the wild type M-MLV RT of SEQ ID NO: 89 or at a corresponding amino acid position in another wild type RT polypeptide sequence, wherein “X” can be any amino acid. In certain embodiments, X is G.

[0577] In various other embodiments, the multi-flap prime editors described herein (with RT provided as either a fusion partner or in trans) can include a variant RT comprising a N454X mutation in the wild type M-MLV RT of SEQ ID NO: 89 or at a corresponding amino acid position in another wild type RT polypeptide sequence, wherein “X” can be any amino acid. In certain embodiments, X is K.

[0578] In various other embodiments, the multi-flap prime editors described herein (with RT provided as either a fusion partner or in trans) can include a variant RT comprising a D524X mutation in the wild type M-MLV RT of SEQ ID NO: 89 or at a corresponding amino acid position in another wild type RT polypeptide sequence, wherein “X” can be any amino acid. In certain embodiments, X is G.

[0579] In various other embodiments, the multi-flap prime editors described herein (with RT provided as either a fusion partner or in trans) can include a variant RT comprising a E562X mutation in the wild type M-MLV RT of SEQ ID NO: 89 or at a corresponding amino acid position in another wild type RT polypeptide sequence, wherein “X” can be any amino acid. In certain embodiments, X is Q.

[0580] In various other embodiments, the multi-flap prime editors described herein (with RT provided as either a fusion partner or in trans) can include a variant RT comprising a D583X mutation in the wild type M-MLV RT of SEQ ID NO: 89 or at a corresponding amino acid position in another wild type RT polypeptide sequence, wherein “X” can be any amino acid. In certain embodiments, X is N.

[0581] In various other embodiments, the multi-flap prime editors described herein (with RT provided as either a fusion partner or in trans) can include a variant RT comprising a H594X mutation in the wild type M-MLV RT of SEQ ID NO: 89 or at a corresponding amino acid position in another wild type RT polypeptide sequence, wherein “X” can be any amino acid. In certain embodiments, X is Q.

[0582] In various other embodiments, the multi-flap prime editors described herein (with RT provided as either a fusion partner or in trans) can include a variant RT comprising a L603X mutation in the wild type M-MLV RT of SEQ ID NO: 89 or at a corresponding amino acid position in another wild type RT polypeptide sequence, wherein “X” can be any amino acid. In certain embodiments, X is W.

[0583] In various other embodiments, the multi-flap prime editors described herein (with RT provided as either a fusion partner or in trans) can include a variant RT comprising a E607X mutation in the wild type M-MLV RT of SEQ ID NO: 89 or at a corresponding amino acid position in another wild type RT polypeptide sequence, wherein “X” can be any amino acid. In certain embodiments, X is K.

[0584] In various other embodiments, the multi-flap prime editors described herein (with RT provided as either a fusion partner or in trans) can include a variant RT comprising a D653X mutation in the wild type M-MLV RT of SEQ ID NO: 89 or at a corresponding amino acid position in another wild type RT polypeptide sequence, wherein “X” can be any amino acid. In certain embodiments, X is N.

[0585] Some exemplary reverse transcriptases that can be fused to napDNAbp proteins or provided as individual proteins according to various embodiments of this disclosure are provided below. Exemplary reverse transcriptases include variants with at least 80%, at least 85%, at least 90%, at least 95% or at least 99% sequence identity to the following wild-type enzymes or partial enzymes:

| DESCRIPTION | SEQUENCE (VARIANT SUBSTITUTIONS RELATIVE TO WILD TYPE) |
|---|---|
| REVERSE | TLNIEDEYRLHETSKEPDVSLGSTWLSDFPQAWAETGGMGLAVRQAPLIIPLK |
| TRANSCRIPTASE | ATSTPVSIKQYPMSQEARLGIKPHIQRLLDQGILVPCQSPWNTPLLPVKKPGTN |
| (M-MLV | DYRPVQDLREVNKRVEDIHPTVPNPYNLLSGLPPSHQWYTVLDLKDAFFCLR |
| RT) WILD | LHPTSQPLFAFEWRDPEMGISGQLTWTRLPQGFKNSPTLFDEALHRDLADFRI |
| TYPE | QHPDLILLQYVDDLLLAATSELDCQQGTRALLQTLGNLGYRASAKKAQICQK |
| MOLONEY | QVKYLGYLLKEGQRWLTEARKETVMGQPTPKTPRQLREFLGTAGFCRLWIPG |
| MURINE | FAEMAAPLYPLTKTGTLFNWGPDQQKAYQEIKQALLTAPALGLPDLTKPFELF |
| LEUKEMIA | VDEKQGYAKGVLTQKLGPWRRPVAYLSKKLDPVAAGWPPCLRMVAAIAVLT |
| VIRUS | KDAGKLTMGQPLVILAPHAVEALVKQPPDRWLSNARMTHYQALLLDTDRVQ |
| USED IN PE1 | FGPVVALNPATLLPLPEEGLQHNCLDILAEAHGTRPDLTDQPLPDADHTWYTD |
| (PRIME | GSSLLQEGQRKAGAAVTTETEVIWAKALPAGTSAQRAELIALTQALKMAEGK |
| EDITOR 1 | KLNVYTDSRYAFATAHIHGEIYRRRGLLTSEGKEIKNKDEILALLKALFLPKRLS |
| FUSION | IIHCPGHQKGHSAEARGNRMADQAARKAAITETPDTSTLLIENSSP (SEQ ID |
| | NO: 89) |
| PROTEIN | |
| DISCLOSED | |
| HEREIN) | |
| M-MLV RT | TLNIEDEYRLHETSKEPDVSLGSTWLSDFPQAWAETGGMGLAVRQAPLIIPLK |
| D200N | ATSTPVSIKQYPMSQEARLGIKPHIQRLLDQGILVPCQSPWNTPLLPVKKPGTN |
| | DYRPVQDLREVNKRVEDIHPTVPNPYNLLSGLPPSHQWYTVLDLKDAFFCLR |
| | LHPTSQPLFAFEWRDPEMGISGQLTWTRLPQGFKNSPTLFNEALHRDLADFRI |
| | QHPDLILLQYVDDLLLAATSELDCQQGTRALLQTLGNLGYRASAKKAQICQK |
| | QVKYLGYLLKEGQRWLTEARKETVMGQPTPKTPRQLREFLGTAGFCRLWIPG |
| | FAEMAAPLYPLTKTGTLFNWGPDQQKAYQEIKQALLTAPALGLPDLTKPFELF |
| | VDEKQGYAKGVLTQKLGPWRRPVAYLSKKLDPVAAGWPPCLRMVAAIAVLT |
| | KDAGKLTMGQPLVILAPHAVEALVKQPPDRWLSNARMTHYQALLLDTDRVQ |
| | FGPVVALNPATLLPLPEEGLQHNCLDILAEAHGTRPDLTDQPLPDADHTWYTD |
| | GSSLLQEGQRKAGAAVTTETEVIWAKALPAGTSAQRAELIALTQALKMAEGK |
| | KLNVYTDSRYAFATAHIHGEIYRRRGLLTSEGKEIKNKDEILALLKALFLPKRLS |
| | IIHCPGHQKGHSAEARGNRMADQAARKAAITETPDTSTLLIENSSP (SEQ ID |
| | NO: 106) |
| M-MLV RT | TLNIEDEYRLHETSKEPDVSLGSTWLSDFPQAWAETGGMGLAVRQAPLIIPLK |
| D200N | ATSTPVSIKQYPMSQEARLGIKPHIQRLLDQGILVPCQSPWNTPLLPVKKPGTN |
| T330P | DYRPVQDLREVNKRVEDIHPTVPNPYNLLSGLPPSHQWYTVLDLKDAFFCLR |
| | LHPTSQPLFAFEWRDPEMGISGQLTWTRLPQGFKNSPTLFNEALHRDLADFRI |
| | QHPDLILLQYVDDLLLAATSELDCQQGTRALLQTLGNLGYRASAKKAQICQK |
| | QVKYLGYLLKEGQRWLTEARKETVMGQPTPKTPRQLREFLGTAGFCRLWIPG |
| | FAEMAAPLYPLTKPGTLFNWGPDQQKAYQEIKQALLTAPALGLPDLTKPFELF |
| | VDEKQGYAKGVLTQKLGPWRRPVAYLSKKLDPVAAGWPPCLRMVAAIAVLT |
| | KDAGKLTMGQPLVILAPHAVEALVKQPPDRWLSNARMTHYQALLLDTDRVQ |
| | FGPVVALNPATLLPLPEEGLQHNCLDILAEAHGTRPDLTDQPLPDADHTWYTD |
| | GSSLLQEGQRKAGAAVTTETEVIWAKALPAGTSAQRAELIALTQALKMAEGK |
| | KLNVYTDSRYAFATAHIHGEIYRRRGLLTSEGKEIKNKDEILALLKALFLPKRLS |
| | IIHCPGHQKGHSAEARGNRMADQAARKAAITETPDTSTLLIENSSP (SEQ ID |
| | NO: 107) |
| M-MLV RT | TLNIEDEYRLHETSKEPDVSLGSTWLSDFPQAWAETGGMGLAVRQAPLIIPLK |
| D200N | ATSTPVSIKQYPMSQEARLGIKPHIQRLLDQGILVPCQSPWNTPLLPVKKPGTN |
| T330P | DYRPVQDLREVNKRVEDIHPTVPNPYNLLSGLPPSHQWYTVLDLKDAFFCLR |
| L603W | LHPTSQPLFAFEWRDPEMGISGQLTWTRLPQGFKNSPTLFNEALHRDLADFRI |
| | QHPDLILLQYVDDLLLAATSELDCQQGTRALLQTLGNLGYRASAKKAQICQK |
| | QVKYLGYLLKEGQRWLTEARKETVMGQPTPKTPRQLREFLGTAGFCRLWIPG |
| | FAEMAAPLYPLTKPGTLFNWGPDQQKAYQEIKQALLTAPALGLPDLTKPFELF |
| | VDEKQGYAKGVLTQKLGPWRRPVAYLSKKLDPVAAGWPPCLRMVAAIAVLT |
| | KDAGKLTMGQPLVILAPHAVEALVKQPPDRWLSNARMTHYQALLLDTDRVQ |
| | FGPVVALNPATLLPLPEEGLQHNCLDILAEAHGTRPDLTDQPLPDADHTWYTD |
| | GSSLLQEGQRKAGAAVTTETEVIWAKALPAGTSAQRAELIALTQALKMAEGK |
| | KLNVYTDSRYAFATAHIHGEIYRRRGWLTSEGKEIKNKDEILALLKALFLPKRL |
| | SIIHCPGHQKGHSAEARGNRMADQAARKAAITETPDTSTLLIENSSP (SEQ ID |
| | NO: 108) |
| M-MLV RT | TLNIEDEYRLHETSKEPDVSLGSTWLSDFPQAWAETGGMGLAVRQAPLIIPLK |
| E69K | ATSTPVSIKQYPMSQKARLGIKPHIQRLLDQGILVPCQSPWNTPLLPVKKPGTN |
| D200N | DYRPVQDLREVNKRVEDIHPTVPNPYNLLSGLPPSHQWYTVLDLKDAFFCLR |
| T330P | LHPTSQPLFAFEWRDPEMGISGQLTWTRLPQGFKNSPTLFNEALHRDLADFRI |
| L603W | QHPDLILLQYVDDLLLAATSELDCQQGTRALLQTLGNLGYRASAKKAQICQK |
| | QVKYLGYLLKEGQRWLTEARKETVMGQPTPKTPRQLREFLGTAGFCRLWIPG |
| | FAEMAAPLYPLTKPGTLFNWGPDQQKAYQEIKQALLTAPALGLPDLTKPFELF |
| | VDEKQGYAKGVLTQKLGPWRRPVAYLSKKLDPVAAGWPPCLRMVAAIAVLT |
| | KDAGKLTMGQPLVILAPHAVEALVKQPPDRWLSNARMTHYQALLLDTDRVQ |
| | FGPVVALNPATLLPLPEEGLQHNCLDILAEAHGTRPDLTDQPLPDADHTWYTD |
| | GSSLLQEGQRKAGAAVTTETEVIWAKALPAGTSAQRAELIALTQALKMAEGK |
| | KLNVYTDSRYAFATAHIHGEIYRRRGWLTSEGKEIKNKDEILALLKALFLPKRL |
| | SIIHCPGHQKGHSAEARGNRMADQAARKAAITETPDTSTLLIENSSP (SEQ ID |
| | NO: 109) |
| M-MLV RT | TLNIEDEYRLHETSKEPDVSLGSTWLSDFPQAWAETGGMGLAVRQAPLIIPLK |
| D200N | ATSTPVSIKQYPMSQEARLGIKPHIQRLLDQGILVPCQSPWNTPLLPVKKPGTN |
| T330P | DYRPVQDLREVNKRVEDIHPTVPNPYNLLSGLPPSHQWYTVLDLKDAFFCLR |
| L603W | LHPTSQPLFAFEWRDPEMGISGQLTWTRLPQGFKNSPTLFNEALHRDLADFRI |
| E302R | QHPDLILLQYVDDLLLAATSELDCQQGTRALLQTLGNLGYRASAKKAQICQK |
| | QVKYLGYLLKEGQRWLTEARKETVMGQPTPKTPRQLRRFLGTAGFCRLWIPG |
| | FAEMAAPLYPLTKPGTLFNWGPDQQKAYQEIKQALLTAPALGLPDLTKPFELF |
| | VDEKQGYAKGVLTQKLGPWRRPVAYLSKKLDPVAAGWPPCLRMVAAIAVLT |
| | KDAGKLTMGQPLVILAPHAVEALVKQPPDRWLSNARMTHYQALLLDTDRVQ |
| | FGPVVALNPATLLPLPEEGLQHNCLDILAEAHGTRPDLTDQPLPDADHTWYTD |
| | GSSLLQEGQRKAGAAVTTETEVIWAKALPAGTSAQRAELIALTQALKMAEGK |
| | KLNVYTDSRYAFATAHIHGEIYRRRGWLTSEGKEIKNKDEILALLKALFLPKRL |
| | SIIHCPGHQKGHSAEARGNRMADQAARKAAITETPDTSTLLIENSSP(SEQ ID |
| | NO: 110) |
| M-MLV RT | TLNIEDEYRLHETSKEPDVSLGSTWLSDFPQAWAETGGMGLAVRQAPLIIPLK |
| D200N | ATSTPVSIKQYPMSQEARLGIKPHIQRLLDQGILVPCQSPWNTPLLPVKKPGTN |
| T330P | DYRPVQDLREVNKRVEDIHPTVPNPYNLLSGLPPSHQWYTVLDLKDAFFCLR |
| L603W | LHPTSQPLFAFEWRDPEMGISGQLTWTRLPQGFKNSPTLFNEALHRDLADFRI |
| E607K | QHPDLILLQYVDDLLLAATSELDCQQGTRALLQTLGNLGYRASAKKAQICQK |
| | QVKYLGYLLKEGQRWLTEARKETVMGQPTPKTPRQLREFLGTAGFCRLWIPG |
| | FAEMAAPLYPLTKPGTLFNWGPDQQKAYQEIKQALLTAPALGLPDLTKPFELF |
| | VDEKQGYAKGVLTQKLGPWRRPVAYLSKKLDPVAAGWPPCLRMVAAIAVLT |
| | KDAGKLTMGQPLVILAPHAVEALVKQPPDRWLSNARMTHYQALLLDTDRVQ |
| | FGPVVALNPATLLPLPEEGLQHNCLDILAEAHGTRPDLTDQPLPDADHTWYTD |
| | GSSLLQEGQRKAGAAVTTETEVIWAKALPAGTSAQRAELIALTQALKMAEGK |
| | KLNVYTDSRYAFATAHIHGEIYRRRGWLTSKGKEIKNKDEILALLKALFLPKRL |
| | SIIHCPGHQKGHSAEARGNRMADQAARKAAITETPDTSTLLIENSSP (SEQ ID |
| | NO: 111) |
| M-MLV RT | TLNIEDEYRLHETSKEPDVSLGSTWLSDFPQAWAETGGMGLAVRQAPLIIPLK |
| D200N | ATSTPVSIKQYPMSQEARLGIKPHIQRLLDQGILVPCQSPWNTPLLPVKKPGTN |
| T330P | DYRPVQDLREVNKRVEDIHPTVPNPYNLLSGPPPSHQWYTVLDLKDAFFCLR |
| L603W | LHPTSQPLFAFEWRDPEMGISGQLTWTRLPQGFKNSPTLFNEALHRDLADFRI |
| L139P | QHPDLILLQYVDDLLLAATSELDCQQGTRALLQTLGNLGYRASAKKAQICQK |
| | QVKYLGYLLKEGQRWLTEARKETVMGQPTPKTPRQLREFLGTAGFCRLWIPG |
| | FAEMAAPLYPLTKPGTLFNWGPDQQKAYQEIKQALLTAPALGLPDLTKPFELF |
| | VDEKQGYAKGVLTQKLGPWRRPVAYLSKKLDPVAAGWPPCLRMVAAIAVLT |
| | KDAGKLTMGQPLVILAPHAVEALVKQPPDRWLSNARMTHYQALLLDTDRVQ |
| | FGPVVALNPATLLPLPEEGLQHNCLDILAEAHGTRPDLTDQPLPDADHTWYTD |
| | GSSLLQEGQRKAGAAVTTETEVIWAKALPAGTSAQRAELIALTQALKMAEGK |
| | KLNVYTDSRYAFATAHIHGEIYRRRGWLTSEGKEIKNKDEILALLKALFLPKRL |
| | SIIHCPGHQKGHSAEARGNRMADQAARKAAITETPDTSTLLIENSSP (SEQ ID |
| | NO: 112) |
| M-MLV RT | TLNIEDEYRLHETSKEPDVSLGSTWLSDFPQAWAETGGMGLAVRQAPLIIPLK |
| D200N | ATSTPVSIKQYPMSQEARLGIKPHIQRLLDQGILVPCQSPWNTPLLPVKKPGTN |
| T330P | DYRPVQDLREVNKRVEDIHPTVPNPYNLLSGLPPSHQWYTVLDLKDAFFCLR |
| L603W | LHPTSQPLFAFEWRDPEMGISGQLTWTRLPQGFKNSPTLFNEALHRDLADFRI |
| L435G | QHPDLILLQYVDDLLLAATSELDCQQGTRALLQTLGNLGYRASAKKAQICQK |
| | QVKYLGYLLKEGQRWLTEARKETVMGQPTPKTPRQLREFLGTAGFCRLWIPG |
| | FAEMAAPLYPLTKPGTLFNWGPDQQKAYQEIKQALLTAPALGLPDLTKPFELF |
| | VDEKQGYAKGVLTQKLGPWRRPVAYLSKKLDPVAAGWPPCLRMVAAIAVLT |
| | KDAGKLTMGQPLVIGAPHAVEALVKQPPDRWLSNARMTHYQALLLDTDRVQ |
| | FGPVVALNPATLLPLPEEGLQHNCLDILAEAHGTRPDLTDQPLPDADHTWYTD |
| | GSSLLQEGQRKAGAAVTTETEVIWAKALPAGTSAQRAELIALTQALKMAEGK |
| | KLNVYTDSRYAFATAHIHGEIYRRRGWLTSEGKEIKNKDEILALLKALFLPKRL |
| | SIIHCPGHQKGHSAEARGNRMADQAARKAAITETPDTSTLLIENSSP (SEQ ID |
| | NO: 113) |
| M-MLV RT | TLNIEDEYRLHETSKEPDVSLGSTWLSDFPQAWAETGGMGLAVRQAPLIIPLK |
| D200N | ATSTPVSIKQYPMSQEARLGIKPHIQRLLDQGILVPCQSPWNTPLLPVKKPGTN |
| T330P | DYRPVQDLREVNKRVEDIHPTVPNPYNLLSGLPPSHQWYTVLDLKDAFFCLR |
| L603W | LHPTSQPLFAFEWRDPEMGISGQLTWTRLPQGFKNSPTLFNEALHRDLADFRI |
| N454K | QHPDLILLQYVDDLLLAATSELDCQQGTRALLQTLGNLGYRASAKKAQICQK |
| | QVKYLGYLLKEGQRWLTEARKETVMGQPTPKTPRQLREFLGTAGFCRLWIPG |
| | FAEMAAPLYPLTKPGTLFNWGPDQQKAYQEIKQALLTAPALGLPDLTKPFELF |
| | VDEKQGYAKGVLTQKLGPWRRPVAYLSKKLDPVAAGWPPCLRMVAAIAVLT |
| | KDAGKLTMGQPLVILAPHAVEALVKQPPDRWLSKARMTHYQALLLDTDRVQ |
| | FGPVVALNPATLLPLPEEGLQHNCLDILAEAHGTRPDLTDQPLPDADHTWYTD |
| | GSSLLQEGQRKAGAAVTTETEVIWAKALPAGTSAQRAELIALTQALKMAEGK |
| | KLNVYTDSRYAFATAHIHGEIYRRRGWLTSEGKEIKNKDEILALLKALFLPKRL |
| | SIIHCPGHQKGHSAEARGNRMADQAARKAAITETPDTSTLLIENSSP (SEQ ID |
| | NO: 114) |
| M-MLV RT | TLNIEDEYRLHETSKEPDVSLGSTWLSDFPQAWAETGGMGLAVRQAPLIIPLK |
| D200N | ATSTPVSIKQYPMSQEARLGIKPHIQRLLDQGILVPCQSPWNTPLLPVKKPGTN |
| T330P | DYRPVQDLREVNKRVEDIHPTVPNPYNLLSGLPPSHQWYTVLDLKDAFFCLR |
| L603W | LHPTSQPLFAFEWRDPEMGISGQLTWTRLPQGFKNSPTLFNEALHRDLADFRI |
| T306K | QHPDLILLQYVDDLLLAATSELDCQQGTRALLQTLGNLGYRASAKKAQICQK |
| | QVKYLGYLLKEGQRWLTEARKETVMGQPTPKTPRQLREFLGKAGFCRLWIPG |
| | FAEMAAPLYPLTKPGTLFNWGPDQQKAYQEIKQALLTAPALGLPDLTKPFELF |
| | VDEKQGYAKGVLTQKLGPWRRPVAYLSKKLDPVAAGWPPCLRMVAAIAVLT |
| | KDAGKLTMGQPLVILAPHAVEALVKQPPDRWLSNARMTHYQALLLDTDRVQ |
| | FGPVVALNPATLLPLPEEGLQHNCLDILAEAHGTRPDLTDQPLPDADHTWYTD |
| | GSSLLQEGQRKAGAAVTTETEVIWAKALPAGTSAQRAELIALTQALKMAEGK |
| | KLNVYTDSRYAFATAHIHGEIYRRRGWLTSEGKEIKNKDEILALLKALFLPKRL |
| | SIIHCPGHQKGHSAEARGNRMADQAARKAAITETPDTSTLLIENSSP (SEQ ID |
| | NO: 115) |
| M-MLV RT | TLNIEDEYRLHETSKEPDVSLGSTWLSDFPQAWAETGGMGLAVRQAPLIIPLK |
| D200N | ATSTPVSIKQYPMSQEARLGIKPHIQRLLDQGILVPCQSPWNTPLLPVKKPGTN |
| T330P | DYRPVQDLREVNKRVEDIHPTVPNPYNLLSGLPPSHQWYTVLDLKDAFFCLR |
| L603W | LHPTSQPLFAFEWRDPEMGISGQLTWTRLPQGFKNSPTLFNEALHRDLADFRI |
| W313F | QHPDLILLQYVDDLLLAATSELDCQQGTRALLQTLGNLGYRASAKKAQICQK |
| | QVKYLGYLLKEGQRWLTEARKETVMGQPTPKTPRQLREFLGTAGFCRLFIPG |
| | FAEMAAPLYPLTKPGTLFNWGPDQQKAYQEIKQALLTAPALGLPDLTKPFELF |
| | VDEKQGYAKGVLTQKLGPWRRPVAYLSKKLDPVAAGWPPCLRMVAAIAVLT |
| | KDAGKLTMGQPLVILAPHAVEALVKQPPDRWLSNARMTHYQALLLDTDRVQ |
| | FGPVVALNPATLLPLPEEGLQHNCLDILAEAHGTRPDLTDQPLPDADHTWYTD |
| | GSSLLQEGQRKAGAAVTTETEVIWAKALPAGTSAQRAELIALTQALKMAEGK |
| | KLNVYTDSRYAFATAHIHGEIYRRRGWLTSEGKEIKNKDEILALLKALFLPKRL |
| | SIIHCPGHQKGHSAEARGNRMADQAARKAAITETPDTSTLLIENSSP (SEQ ID |
| | NO: 116) |
| M-MLV RT | TLNIEDEYRLHETSKEPDVSLGSTWLSDFPQAWAETGGMGLAVRQAPLIIPLK |
| D200N | ATSTPVSIKQYPMSQEARLGIKPHIQRLLDQGILVPCQSPWNTPLLPVKKPGTN |
| T330P | DYRPVQDLREVNKRVEDIHPTVPNPYNLLSGLPPSHQWYTVLDLKDAFFCLR |
| L603W | LHPTSQPLFAFEWRDPEMGISGQLTWTRLPQGFKNSPTLFNEALHRDLADFRI |
| D524G | QHPDLILLQYVDDLLLAATSELDCQQGTRALLQTLGNLGYRASAKKAQICQK |
| E562Q | QVKYLGYLLKEGQRWLTEARKETVMGQPTPKTPRQLREFLGTAGFCRLWIPG |
| D583N | FAEMAAPLYPLTKPGTLFNWGPDQQKAYQEIKQALLTAPALGLPDLTKPFELF |
| | VDEKQGYAKGVLTQKLGPWRRPVAYLSKKLDPVAAGWPPCLRMVAAIAVLT |
| | KDAGKLTMGQPLVILAPHAVEALVKQPPDRWLSNARMTHYQALLLDTDRVQ |
| | FGPVVALNPATLLPLPEEGLQHNCLDILAEAHGTRPDLTDQPLPDADHTWYTG |
| | GSSLLQEGQRKAGAAVTTETEVIWAKALPAGTSAQRAQLIALTQALKMAEGK |
| | KLNVYTNSRYAFATAHIHGEIYRRRGWLTSEGKEIKNKDEILALLKALFLPKRL |
| | SIIHCPGHQKGHSAEARGNRMADQAARKAAITETPDTSTLLIENSSP (SEQ ID |
| | NO: 117) |
| M-MLV RT | TLNIEDEYRLHETSKEPDVSLGSTWLSDFPQAWAETGGMGLAVRQAPLIIPLK |
| D200N | ATSTPVSIKQYPMSQEARLGIKPHIQRLLDQGILVPCQSPWNTPLLPVKKPGTN |
| T330P | DYRPVQDLREVNKRVEDIHPTVPNPYNLLSGLPPSHQWYTVLDLKDAFFCLR |
| L603W | LHPTSQPLFAFEWRDPEMGISGQLTWTRLPQGFKNSPTLFNEALHRDLADFRI |
| E302R | QHPDLILLQYVDDLLLAATSELDCQQGTRALLQTLGNLGYRASAKKAQICQK |
| W313F | QVKYLGYLLKEGQRWLTEARKETVMGQPTPKTPRQLRRFLGTAGFCRLFIPG |
| | FAEMAAPLYPLTKPGTLFNWGPDQQKAYQEIKQALLTAPALGLPDLTKPFELF |
| | VDEKQGYAKGVLTQKLGPWRRPVAYLSKKLDPVAAGWPPCLRMVAAIAVLT |
| | KDAGKLTMGQPLVILAPHAVEALVKQPPDRWLSNARMTHYQALLLDTDRVQ |
| | FGPVVALNPATLLPLPEEGLQHNCLDILAEAHGTRPDLTDQPLPDADHTWYTD |
| | GSSLLQEGQRKAGAAVTTETEVIWAKALPAGTSAQRAELIALTQALKMAEGK |
| | KLNVYTDSRYAFATAHIHGEIYRRRGWLTSEGKEIKNKDEILALLKALFLPKRL |
| | SIIHCPGHQKGHSAEARGNRMADQAARKAAITETPDTSTLLIENSSP (SEQ ID |
| | NO: 118) |
| M-MLV RT | TLNIEDEYRLHETSKEPDVSLGSTWLSDFPQAWAETGGMGLAVRQAPLIIPLK |
| D200N | ATSTPVSIKQYPMSQEARLGIKPHIQRLLDQGILVPCQSPWNTPLLPVKKPGTN |
| T330P | DYRPVQDLREVNKRVEDIHPTVPNPYNLLSGPPPSHQWYTVLDLKDAFFCLR |
| L603W | LHPTSQPLFAFEWRDPEMGISGQLTWTRLPQGFKNSPTLFNEALHRDLADFRI |
| E607K | QHPDLILLQYVDDLLLAATSELDCQQGTRALLQTLGNLGYRASAKKAQICQK |
| L139P | QVKYLGYLLKEGQRWLTEARKETVMGQPTPKTPRQLREFLGTAGFCRLWIPG |
| | FAEMAAPLYPLTKPGTLFNWGPDQQKAYQEIKQALLTAPALGLPDLTKPFELF |
| | VDEKQGYAKGVLTQKLGPWRRPVAYLSKKLDPVAAGWPPCLRMVAAIAVLT |
| | KDAGKLTMGQPLVILAPHAVEALVKQPPDRWLSNARMTHYQALLLDTDRVQ |
| | FGPVVALNPATLLPLPEEGLQHNCLDILAEAHGTRPDLTDQPLPDADHTWYTD |
| | GSSLLQEGQRKAGAAVTTETEVIWAKALPAGTSAQRAELIALTQALKMAEGK |
| | KLNVYTDSRYAFATAHIHGEIYRRRGWLTSKGKEIKNKDEILALLKALFLPKRL |
| | SIIHCPGHQKGHSAEARGNRMADQAARKAAITETPDTSTLLIENSSP (SEQ ID |
| | NO: 119) |
| M-MLV RT | TLNIEDEYRLHETSKEPDVSLGSTWLSDFPQAWAETGGMGLAVRQAPLIILLK |
| P51L S67K | ATSTPVSIKQYPMKQEARLGIKPHIQRLLDQGILVPCQSPWNTPLLPVKKPGTN |
| T197A H204R | DYRPVQDLREVNKRVEDIHPTVPNPYNLLSGLPPSHQWYTVLDLKDAFFCLR |
| E302K F309N | LHPTSQPLFAFEWRDPEMGISGQLTWTRLPQGFKNSPALFDEALRRDLADFRI |
| W313F T330P | QHPDLILLQYVDDLLLAATSELDCQQGTRALLQTLGNLGYRASAKKAQICQK |
| L435G N454K | QVKYLGYLLKEGQRWLTEARKETVMGQPTPKTPRQLRKFLGTAGNCRLFIPG |
| D524G D583N | FAEMAAPLYPLTKPGTLFNWGPDQQKAYQEIKQALLTAPALGLPDLTKPFELF |
| H594Q D653N | VDEKQGYAKGVLTQKLGPWRRPVAYLSKKLDPVAAGWPPCLRMVAAIAVLT |
| | KDAGKLTMGQPLVIGAPHAVEALVKQPPDRWLSKARMTHYQALLLDTDRVQ |
| | FGPVVALNPATLLPLPEEGLQHNCLDILAEAHGTRPDLTDQPLPDADHTWYTG |
| | GSSLLQEGQRKAGAAVTTETEVIWAKALPAGTSAQRAELIALTQALKMAEGK |
| | KLNVYTNSRYAFATAHIQGEIYRRRGLLTSEGKEIKNKDEILALLKALFLPKRLS |
| | IIHCPGHQKGHSAEARGNRMANQAARKAAITETPDTSTLLIENSSP (SEQ ID |
| | NO: 120) |
| M-MLV RT | TLNIEDEYRLHETSKEPDVSLGSTWLSDFPQAWAETGGMGLAVRQAPLIILLK |
| P51L S67K | ATSTPVSIKQYPMKQEARLGIKPHIQRLLDQGILVPCQSPWNTPLLPVKKPGTN |
| T197A D200N | DYRPVQDLREVNKRVEDIHPTVPNPYNLLSGLPPSHQWYTVLDLKDAFFCLR |
| H204R E302K | LHPTSQPLFAFEWRDPEMGISGQLTWTRLPQGFKNSPALFNEALRRDLADFRI |
| F309N W313F | QHPDLILLQYVDDLLLAATSELDCQQGTRALLQTLGNLGYRASAKKAQICQK |
| T330P L345G | QVKYLGYLLKEGQRWLTEARKETVMGQPTPKTPRQLRKFLGTAGNCRLFIPG |
| N454K D524G | FAEMAAPLYPLTKPGTLFNWGPDQQKAYQEIKQALLTAPALGLPDLTKPFELF |
| D583N H594Q | VDEKQGYAKGVLTQKLGPWRRPVAYLSKKLDPVAAGWPPCLRMVAAIAVLT |
| D653N | KDAGKLTMGQPLVIGAPHAVEALVKQPPDRWLSKARMTHYQALLLDTDRVQ |
| | FGPVVALNPATLLPLPEEGLQHNCLDILAEAHGTRPDLTDQPLPDADHTWYTG |
| | GSSLLQEGQRKAGAAVTTETEVIWAKALPAGTSAQRAELIALTQALKMAEGK |
| | KLNVYTNSRYAFATAHIQGEIYRRRGLLTSEGKEIKNKDEILALLKALFLPKRLS |
| | IIHCPGHQKGHSAEARGNRMANQAARKAAITETPDTSTLLIENSSP (SEQ ID |
| | NO: 121) |
| M-MLV RT | TLNIEDEYRLHETSKEPDVSLGSTWLSDFPQAWAETGGMGLAVRQAPLIIPLK |
| D200N T330P | ATSTPVSIKQYPMSQEARLGIKPHIQRLLDQGILVPCQSPWNTPLLPVKKPGTN |
| L603W T306K | DYRPVQDLREVNKRVEDIHPTVPNPYNLLSGLPPSHQWYTVLDLKDAFFCLR |
| W313F | LHPTSQPLFAFEWRDPEMGISGQLTWTRLPQGFKNSPTLFNEALHRDLADFRI |
| IN PE2 | QHPDLILLQYVDDLLLAATSELDCQQGTRALLQTLGNLGYRASAKKAQICQK |
| | QVKYLGYLLKEGQRWLTEARKETVMGQPTPKTPRQLREFLGKAGFCRLFIPG |
| | FAEMAAPLYPLTKPGTLFNWGPDQQKAYQEIKQALLTAPALGLPDLTKPFELF |
| | VDEKQGYAKGVLTQKLGPWRRPVAYLSKKLDPVAAGWPPCLRMVAAIAVLT |
| | KDAGKLTMGQPLVILAPHAVEALVKQPPDRWLSNARMTHYQALLLDTDRVQ |
| | FGPVVALNPATLLPLPEEGLQHNCLDILAEAHGTRPDLTDQPLPDADHTWYTD |
| | GSSLLQEGQRKAGAAVTTETEVIWAKALPAGTSAQRAELIALTQALKMAEGK |
| | KLNVYTDSRYAFATAHIHGEIYRRRGWLTSEGKEIKNKDEILALLKALFLPKRL |
| | SIIHCPGHQKGHSAEARGNRMADQAARKAAITETPDTSTLLIENSSP (SEQ ID |
| | NO: 122) |

[0586] The multi-flap prime editor system described here contemplates any publicly-available reverse transcriptase described or disclosed in any of the following U.S. patents (each of which are incorporated by reference in their entireties): U.S. Pat. Nos: 10,202,658; 10,189,831; 10,150,955; 9,932,567; 9,783,791; 9,580,698; 9,534,201; and 9,458,484, and any variant thereof that can be made using known methods for installing mutations, or known methods for evolving proteins. The following references describe reverse transcriptases in art. Each of their disclosures are incorporated herein by reference in their entireties.

[0587] Herzig, E., Voronin, N., Kucherenko, N. & Hizi, A. A Novel Leu92 Mutant of HIV-1 Reverse Transcriptase with a Selective Deficiency in Strand Transfer Causes a Loss of Viral Replication. J. Virol. 89, 8119-8129 (2015).

[0588] Mohr, G. et al. A Reverse Transcriptase-Casl Fusion Protein Contains a Cas6 Domain Required for Both CRISPR RNA Biogenesis and RNA Spacer Acquisition. Mol. Cell 72, 700-714.e8 (2018).

[0589] Zhao, C., Liu, F. & Pyle, A. M. An ultraprocessive, accurate reverse transcriptase encoded by a metazoan group II intron. RNA 24, 183-195 (2018).

[0590] Zimmerly, S. & Wu, L. An Unexplored Diversity of Reverse Transcriptases in Bacteria. Microbiol Spectr 3, MDNA3-0058-2014 (2015).

[0591] Ostertag, E. M. & Kazazian Jr, H. H. Biology of Mammalian L1 Retrotransposons. Annual Review of Genetics 35, 501-538 (2001).

[0592] Perach, M. & Hizi, A. Catalytic Features of the Recombinant Reverse Transcriptase of Bovine Leukemia Virus Expressed in Bacteria. Virology 259, 176-189 (1999).

[0593] Lim, D. et al. Crystal structure of the moloney murine leukemia virus RNase H domain. J. Virol. 80, 8379-8389 (2006).

[0594] Zhao, C. & Pyle, A. M. Crystal structures of a group II intron maturase reveal a missing link in spliceosome evolution. Nature Structural & Molecular Biology 23, 558-565 (2016).

[0595] Griffiths, D. J. Endogenous retroviruses in the human genome sequence. Genome Biol. 2, REVIEWS1017 (2001).

[0596] Baranauskas, A. et al. Generation and characterization of new highly thermostable and processive M-MuLV reverse transcriptase variants. Protein Eng Des Sel 25, 657-668 (2012).

[0597] Zimmerly, S., Guo, H., Perlman, P. S. & Lambowltz, A. M. Group II intron mobility occurs by target DNA-primed reverse transcription. Cell 82, 545-554 (1995).

[0598] Feng, Q., Moran, J. V., Kazazian, H. H. & Boeke, J. D. Human L1 retrotransposon encodes a conserved endonuclease required for retrotransposition. Cell 87, 905-916 (1996).

[0599] Berkhout, B., Jebbink, M. & Zsíros, J. Identification of an Active Reverse Transcriptase Enzyme Encoded by a Human Endogenous HERV-K Retrovirus. Journal of Virology 73, 2365-2375 (1999).

[0600] Kotewicz, M. L., Sampson, C. M., D′Alessio, J. M. & Gerard, G. F. Isolation of cloned Moloney murine leukemia virus reverse transcriptase lacking ribonuclease H activity. Nucleic Acids Res 16, 265-277 (1988).

[0601] Arezi, B. & Hogrefe, H. Novel mutations in Moloney Murine Leukemia Virus reverse transcriptase increase thermostability through tighter binding to template-primer. Nucleic Acids Res 37, 473-481 (2009).

[0602] Blain, S. W. & Goff, S. P. Nuclease activities of Moloney murine leukemia virus reverse transcriptase. Mutants with altered substrate specificities. J. Biol. Chem. 268, 23585-23592 (1993).

[0603] Xiong, Y. & Eickbush, T. H. Origin and evolution of retroelements based upon their reverse transcriptase sequences. EMBO J 9, 3353-3362 (1990).

[0604] Herschhorn, A. & Hizi, A. Retroviral reverse transcriptases. Cell. Mol. Life Sci. 67, 2717-2747 (2010).

[0605] Taube, R., Loya, S., Avidan, O., Perach, M. & Hizi, A. Reverse transcriptase of mouse mammary tumour virus: expression in bacteria, purification and biochemical characterization. Biochem. J. 329 (Pt 3), 579-587 (1998).

[0606] Liu, M. et al. Reverse Transcriptase-Mediated Tropism Switching in Bordetella Bacteriophage. Science 295, 2091-2094 (2002).

[0607] Luan, D. D., Korman, M. H., Jakubczak, J. L. & Eickbush, T. H. Reverse transcription of R2Bm RNA is primed by a nick at the chromosomal target site: a mechanism for non-LTR retrotransposition. Cell 72, 595-605 (1993).

[0608] Nottingham, R. M. et al. RNA-seq of human reference RNA samples using a thermostable group II intron reverse transcriptase. RNA 22, 597-613 (2016).

[0609] Telesnitsky, A. & Goff, S. P. RNase H domain mutations affect the interaction between Moloney murine leukemia virus reverse transcriptase and its primer-template. Proc. Natl. Acad. Sci. U.S.A. 90, 1276-1280 (1993).

[0610] Halvas, E. K., Svarovskaia, E. S. & Pathak, V. K. Role of Murine Leukemia Virus Reverse Transcriptase Deoxyribonucleoside Triphosphate-Binding Site in Retroviral Replication and In Vivo Fidelity. Journal of Virology 74, 10349-10358 (2000).

[0611] Nowak, E. et al. Structural analysis of monomeric retroviral reverse transcriptase in complex with an RNA/DNA hybrid. Nucleic Acids Res 41, 3874-3887 (2013).

[0612] Stamos, J. L., Lentzsch, A. M. & Lambowitz, A. M. Structure of a Thermostable Group II Intron Reverse Transcriptase with Template-Primer and Its Functional and Evolutionary Implications. Molecular Cell 68, 926-939.e4 (2017).

[0613] Das, D. & Georgiadis, M. M. The Crystal Structure of the Monomeric Reverse Transcriptase from Moloney Murine Leukemia Virus. Structure 12, 819-829 (2004).

[0614] Avidan, O., Meer, M. E., Oz, I. & Hizi, A. The processivity and fidelity of DNA synthesis exhibited by the reverse transcriptase of bovine leukemia virus. European Journal of Biochemistry 269, 859-867 (2002).

[0615] Gerard, G. F. et al. The role of template-primer in protection of reverse transcriptase from thermal inactivation. Nucleic Acids Res 30, 3118-3129 (2002).

[0616] Monot, C. et al. The Specificity and Flexibility of L1 Reverse Transcription Priming at Imperfect T-Tracts. PLOS Genetics 9, e1003499 (2013).

[0617] Mohr, S. et al. Thermostable group II intron reverse transcriptase fusion proteins and their use in cDNA synthesis and next-generation RNA sequencing. RNA 19, 958-970 (2013).

[0618] Any of the references noted above which relate to reverse transriptases are hereby incorporated by reference in their entireties, if not already stated so.

### [4] Prime Editors

[0619] The disclosure provides systems comprising prime editors. In one aspect, this disclosure provides systems for simultaneously editing both strands of a double-stranded DNA sequence at a target site to be edited comprising a first prime editor complex and a second prime editor complex, wherein each of the first and second prime editor complexes comprises (1) a prime editor comprising (i) a nucleic acid programmable DNA binding protein (napDNAbp), and (ii) a polypeptide having an RNA-dependent DNA polymerase activity; and (2) a pegRNA comprising a spacer sequence, gRNA core, a DNA synthesis template, and a primer binding site, wherein the DNA synthesis template of the pegRNA of the first prime editor complex encodes a first single-stranded DNA sequence and the DNA synthesis template of the pegRNA of the second prime editor complex encodes a second single-stranded DNA sequence, wherein the first single-stranded DNA sequence and the second single-stranded DNA sequence each comprises a region of complementarity to the other, and wherein the first single-stranded DNA sequence and the second single-stranded DNA sequence form a duplex comprising an edited portion as compared to the DNA sequence at the target site to be edited, which integrates into the target site to be edited.

[0620] In another aspect, the present disclosure provides systems for editing one or more double-stranded DNA sequences, the system comprising:
[0621] a) a first prime editor complex comprising:
   [0622] i. a first prime editor comprising a first nucleic acid programmable DNA binding protein (first napDNAbp) and a first polypeptide comprising an RNA-dependent DNA polymerase activity; and
   [0623] ii. a first prime editing guide RNA (first PEgRNA) that binds to a first binding site on a first strand of a first double-stranded DNA sequence at a first target site to be edited;
[0624] b) a second prime editor complex comprising:
   [0625] i. a second prime editor comprising a second nucleic acid programmable DNA binding protein (second napDNAbp) and a second polypeptide comprising an RNA-dependent DNA polymerase activity; and
   [0626] ii. a second prime editing guide RNA (second PEgRNA) that binds to a second binding site on a second strand of the first double-stranded DNA sequence at the first target site to be edited;
[0627] c) a third prime editor complex comprising:
   [0628] i. a third prime editor comprising a third nucleic acid programmable DNA binding protein (third napDNAbp) and a third polypeptide comprising an RNA-dependent DNA polymerase activity; and
   [0629] ii. a third prime editing guide RNA (third PEgRNA) that binds to a first binding site on a first strand of a second double-stranded DNA sequence at a second target site to be edited;
[0630] d) a fourth prime editor complex comprising:
   [0631] i. a fourth prime editor comprising a fourth nucleic acid programmable DNA binding protein (fourth napDNAbp) and a fourth polypeptide comprising an RNA-dependent DNA polymerase activity; and
   [0632] ii. a fourth prime editing guide RNA (fourth PEgRNA) that binds to a second binding site on a second strand of the second double-stranded DNA sequence at the second target site to be edited;
      [0633] wherein the first PEgRNA comprises a first DNA synthesis template encoding a first single-stranded DNA sequence, the second PEgRNA comprises a second DNA synthesis template encoding a second single-stranded DNA sequence, the third PEgRNA comprises a third DNA synthesis template encoding a third single-stranded DNA sequence, and the fourth PEgRNA comprises a fourth DNA synthesis template encoding a fourth single-stranded DNA sequence;
      [0634] wherein the first and the third single-stranded DNA sequence each comprise a region of complementarity to the other; and wherein, wherein the second and the fourth single-stranded DNA sequence each comprise a region of complementarity to the other.

[0635] In some embodiments, the prime editors used in the systems described herein (e.g., the first prime editor, second prime editor, third prime editor, and/or fourth prime editor in the systems described above) are provided as fusion proteins. In some embodiments, the prime editor fusion proteins comprise a napDNAbp and a polymerase (e.g., DNA-dependent DNA polymerase or RNA-dependent DNA polymerase, such as, reverse transcriptase). In some embodiments, the napDNAbp and the polymerase are optionally joined by linker to form the fusion protein. Various configurations of the prime editor fusion proteins and additional domains of the fusion proteins are described further herein. In various embodiments, the systems and methods provided by the present disclosure contemplate the use of any of the prime editor fusion proteins described herein.

[0636] In some embodiments, the prime editor complexes used in the systems described herein comprise a prime editor (e.g., the first prime editor, second prime editor, third prime editor, and/or fourth prime editor in the systems described above) where the components of one or more of the prime editors are provided in trans, as is described in additional detail throughout the present specification. In some embodiments, the prime editor comprises a napDNAbp and a polymerase expressed in trans. In some embodiments, the napDNAbp and the polymerase are expressed from one or more vectors (e.g., both components are expressed from the same vector, or each component is expressed from a different vector). In certain embodiments, the prime editors comprise additional components as described herein expressed in trans. In some embodiments, the prime editors used in the systems described herein may comprise both one or more prime editors provided as fusion proteins and one or more prime editors whose components are provided in trans.

[0637] In some embodiments, the multi-flap prime editor systems described herein contemplate fusion proteins comprising a napDNAbp and a polymerase (e.g., DNA-dependent DNA polymerase or RNA-dependent DNA polymerase, such as, reverse transcriptase), and optionally joined by a linker. The application contemplates any suitable napDNAbp and polymerase (e.g., DNA-dependent DNA polymerase or RNA-dependent DNA polymerase, such as, reverse transcriptase) to be combined in a single fusion protein. Examples of napDNAbps and polymerases (e.g., DNA-dependent DNA polymerase or RNA-dependent DNA polymerase, such as, reverse transcriptase) are each defined herein. Since polymerases are well-known in the art, and the amino acid sequences are readily available, this disclosure is not meant in any way to be limited to those specific polymerases identified herein.

[0638] In various embodiments, the fusion proteins may comprise any suitable structural configuration. For example, the fusion protein may comprise from the N-terminus to the C-terminus direction, a napDNAbp fused to a polymerase (e.g., DNA-dependent DNA polymerase or RNA-dependent DNA polymerase, such as, reverse transcriptase) . In other embodiments, the fusion protein may comprise from the N-terminus to the C-terminus direction, a polymerase (e.g., a reverse transcriptase) fused to a napDNAbp. The fused domain may optionally be joined by a linker, e.g., an amino acid sequence. In other embodiments, the fusion proteins may comprise the structure NH₂-[napDNAbp]-[polymerase]-COOH; or NH[polymerase]-[napDNAbp]-COOH, wherein each instance of “]-[” indicates the presence of an optional linker sequence. In embodiments wherein the polymerase is a reverse transcriptase, the fusion proteins may comprise the structure NH₂-[napDNAbp]-[RT]-COOH; or NH₂-[RT]-[napDNAbp]-COOH, wherein each instance of “]-[” indicates the presence of an optional linker sequence.

[0639] An exemplary fusion protein is depicted in FIG. 14, which shows a fusion protein comprising an MLV reverse transcriptase (“MLV-RT”) fused to a nickase Cas9 (“Cas9(H840A)”) via a linker sequence. This example is not intended to limit scope of fusion proteins that may be utilized for the prime editor (PE) system described herein.

[0640] In various embodiments, the multi-flap prime editor fusion protein may have the following amino acid sequence (referred to herein as “PE1”), which includes a Cas9 variant comprising an H840A mutation (i.e., a Cas9 nickase) and an M-MLV RT wild type, as well as an N-terminal NLS sequence (19 amino acids) and an amino acid linker (32 amino acids) that joins the C-terminus of the Cas9 nickase domain to the N-terminus of the RT domain. The PE1 fusion protein has the following structure: [NLS]-[Cas9(H840A)]-[linkerHMMLV_RT(wt)]. The amino acid sequence of PE1 and its individual components are as follows:

| DESCRIPTION | SEQUENCE |
|---|---|
| PE1 FUSION | MKRTADGSEFESPKKKRKVDKKYSIGLDIGTNSVGWAVITDEYKVPSKKFK |
| PROTEIN | VLGNTDRHSIKKNLIGALLFDSGETAEATRLKRTARRRYTRRKNRICYLQ |
| CAS9(H840A)- | EIFSNEMAKYDDSFFHRLEESFLVEEDKKHERHPIFGNIVDEVAYHEKYPT |
| MMLV_RT(WT) | IYHLRKKLVDSTDKADLRLIYLALAHMIKFRGHFLIEGDLNPDNSDVDKL |
| | FIQLVQTYNQLFEENPINASGVDAKAILSARLSKSRRLENLIAQLPGEKKN |
| | GLFGNLIALSLGLTPNFKSNFDLAEDAKLQLSKDTYDDDLDNLLAQIGDQ |
| | YADLFLAAKNLSDAILLSDILRVNTEITKAPLSASMIKRYDEHHQDLTLLK |
| | ALVRQQLPEKYKEIFFDQSKNGYAGYIDGGASQEEFYKFIKPILEKMDGT |
| | EELLVKLNREDLLRKQRTFDNGSIPHQIHLGELHAILRRQEDFYPFLKDN |
| | REKIEKILTFRIPYYVGPLARGNSRFAWMTRKSEETITPWNFEEVVDKGAS |
| | AQSFIERMTNFDKNLPNEKVLPKHSLLYEYFTVYNELTKVKYVTEGMRK |
| | PAFLSGEQKKAIVDLLFKTNRKVTVKQLKEDYFKKIECFDSVEISGVEDR |
| | FNASLGTYHDLLKIIKDKDFLDNEENEDILEDIVLTLTLFEDREMIEERLKT |
| | YAHLFDDKVMKQLKRRRYTGWGRLSRKLINGIRDKQSGKTILDFLKSDG |
| | FANRNFMQLIHDDSLTFKEDIQKAQVSGQGDSLHEHIANLAGSPAIKKGIL |
| | QTVKVVDELVKVMGRHKPENIVIEMARENQTTQKGQKNSRERMKRIEE |
| | GIKELGSQILKEHPVENTQLQNEKLYLYYLQNGRDMYVDQELDINRLSDY |
| | DVDAIVPQSFLKDDSIDNKVLTRSDKNRGKSDNVPSEEVVKKMKNYWRQ |
| | LLNAKLITQRKFDNLTKAERGGLSELDKAGFIKRQLVETRQITKHVAQIL |
| | DSRMNTKYDENDKLIREVKVITLKSKLVSDFRKDFQFYKVREINNYHHAH |
| | DAYLNAVVGTALIKKYPKLESEFVYGDYKVYDVRKMIAKSEQEIGKATAK |
| | YFFYSNIMNFFKTEITLANGEIRKRPLIETNGETGEIVWDKGRDFATVRKV |
| | LSMPQVNIVKKTEVQTGGFSKESILPKRNSDKLIARKKDWDPKKYGGFD |
| | SPTVAYSVLVVAKVEKGKSKKLKSVKELLGITIMERSSFEKNPIDFLEAKG |
| | YKEVKKDLIIKLPKYSLFELENGRKRMLASAGELQKGNELALPSKYVNFL |
| | YLASHYEKLKGSPEDNEQKQLFVEQHKHYLDEIIEQISEFSKRVILADANL |
| | DKVLSAYNKHRDKPIREQAENIIHLFTLTNLGAPAAFKYFDTTIDRKRYTS |
| | TKEVLDATLIHOSITGLYETRIDLSQLGGDSGGSSGGSSGSETPGTSESATP |
| | ESSGGSSGGSSTLNIEDEYRLHETSKEPDVSLGSTWLSDFPQAWAETGGMGLAVR |
| | QAPLIIPLKATSTPVSIKQYPMSQEARLGIKPHIQRLLDQGILVPCQSPWNTPLLPVK |
| | KPGTNDYRPVQDLREVNKRVEDIHPTVPNPYNLLSGLPPSHQWYTVLDLKDAFFC |
| | LRLHPTSQPLFAFEWRDPEMGISGQLTWTRLPQGFKNSPTLFDEALHRDLADFRI |
| | QHPDLILLQYVDDLLLAATSELDCQQGTRALLQTLGNLGYRASAKKAQICQKQVKY |
| | LGYLLKEGQRWLTEARKETVMGQPTPKTPRQLREFLGTAGFCRLWIPGFAEMAAP |
| | LYPLTKTGTLFNWGPDQQKAYQEIKQALLTAPALGLPDLTKPFELFVDEKQGYAK |
| | GVLTQKLGPWRRPVAYLSKKLDPVAAGWPPCLRMVAAIAVLTKDAGKLTMGQPLV |
| | ILAPHAVEALVKQPPDRWLSNARMTHYQALLLDTDRVQFGPWALNPATLLPLPEE |
| | GLQHNCLDILAEAHGTRPDLTDQPLPDADHTWYTDGSSLLQEGQRKAGAAVTTET |
| | EVIWAKALPAGTSAQRAELIALTQALKMAEGKKLNVYTDSRYAFATAHIHGEIYRRRG |
| | LLTSEGKEIKNKDEILALLKALFLPKRLSHHCPGHQKGHSAEARGNRMADQAARK |
| | AAITETPDTSTLLIENSSPSGGSKRTADGSEFEPKKKRKV (SEQ ID NO: 123) |
| | KEY: |
| | NUCLEAR LOCALIZATION SEQUENCE (NLS) TOP:(SEQ ID NO: 124), |
| | BOTTOM: (SEQ ID NO: 133) |
| | CAS9(H840A) (SEQ ID NO: 126) |
| | 33-AMINO ACID LINKER (SEQ ID NO: 127) |
| | M-MLVREVERSE TRANSCRIPTASE (SEQ ID NO: 128) |
| PE1-N- | MKRTADGSEFESPKKKRKV (SEQ ID NO: 124) |
| TERMINAL | |
| NLS | |
| PE1-CAS9 | DKKYSIGLDIGTNSVGWAVITDEYKVPSKKFKVLGNTDRHSIKKNLIGALLFDS |
| (H840A)(MET | GETAEATRLKRTARRRYTRRKNRICYLQEIFSNEMAKVDDSFFHRLEESFLVEE |
| MINUS) | DKKHERHPIFGNIVDEVAYHEKYPTIYHLRKKLVDSTDKADLRLIYLALAHMI |
| | KFRGHFLIEGDLNPDNSDVDKLFIQLVQTYNQLFEENPINASGVDAKAILSARL |
| | SKSRRLENLIAQLPGEKKNGLFGNLIALSLGLTPNFKSNFDLAEDAKLQLSKDT |
| | YDDDLDNLLAQIGDQYADLFLAAKNLSDAILLSDILRVNTEITKAPLSASMIKR |
| | YDEHHQDLTLLKALVRQQLPEKYKEIFFDQSKNGYAGYIDGGASQEEFYKFIK |
| | PILEKMDGTEELLVKLNREDLLRKQRTFDNGSIPHQIHLGELHAILRRQEDFYP |
| | FLKDNREKIEKILTFRIPYYVGPLARGNSRFAWMTRKSEETITPWNFEEVVDKG |
| | ASAQSFIERMTNFDKNLPNEKVLPKHSLLYEYFTVYNELTKVKYVTEGMRKP |
| | AFLSGEQKKAIVDLLFKTNRKVTVKQLKEDYFKKIECFDSVEISGVEDRFNAS |
| | LGTYHDLLKIIKDKDFLDNEENEDILEDIVLTLTLFEDREMIEERLKTYAHLFDD |
| | KVMKQLKRRRYTGWGRLSRKLINGIRDKQSGKTILDFLKSDGFANRNFMQLI |
| | HDDSLTFKEDIQKAQVSGQGDSLHEHIANLAGSPAIKKGILQTVKVVDELVKV |
| | MGRHKPENIVIEMARENQTTQKGQKNSRERMKRIEEGIKELGSQILKEHPVEN |
| | TQLQNEKLYLYYLQNGRDMYVDQELDINRLSDYDVDAIVPQSFLKDDSIDNK |
| | VLTRSDKNRGKSDNVPSEEVVKKMKNYWRQLLNAKLITQRKFDNLTKAERG |
| | GLSELDKAGFIKRQLVETRQITKHVAQILDSRMNTKYDENDKLIREVKVITLKS |
| | KLVSDFRKDFQFYKVREINNYHHAHDAYLNAVVGTALIKKYPKLESEFVYGD |
| | YKVYDVRKMIAKSEQEIGKATAKYFFYSNIMNFFKTEITLANGEIRKRPLIETN |
| | GETGEIVWDKGRDFATVRKVLSMPQVNIVKKTEVQTGGFSKESILPKRNSDKL |
| | IARKKDWDPKKYGGFDSPTVAYSVLVVAKVEKGKSKKLKSVKELLGITIMERS |
| | SFEKNPIDFLEAKGYKEVKKDLIIKLPKYSLFELENGRKRMLASAGELQKGNE |
| | LALPSKYVNFLYLASHYEKLKGSPEDNEQKQLFVEQHKHYLDEIIEQISEFSKR |
| | VILADANLDKVLSAYNKHRDKPIREQAENIIHLFTLTNLGAPAAFKYFDTTIDR |
| | KRYTSTKEVLDATLIHQSITGLYETRIDLSQLGGD (SEQ ID NO: 130) |
| PE1-LINKER | SGGSSGGSSGSETPGTSESATPESSGGSSGGSS (SEQ ID NO: 127) |
| BETWEEN | |
| CAS9 | |
| DOMAIN | |
| ANDRT | |
| DOMAIN (33 | |
| AMINO | |
| ACIDS) | |
| PE1-M-MLV | TLNIEDEYRLHETSKEPDVSLGSTWLSDFPQAWAETGGMGLAVRQAPLIIPLK |
| RT | ATSTPVSIKQYPMSQEARLGIKPHIQRLLDQGILVPCQSPWNTPLLPVKKPGTN |
| | DYRPVQDLREVNKRVEDIHPTVPNPYNLLSGLPPSHQWYTVLDLKDAFFCLR |
| | LHPTSQPLFAFEWRDPEMGISGQLTWTRLPQGFKNSPTLFDEALHRDLADFRI |
| | QHPDLILLQYVDDLLLAATSELDCQQGTRALLQTLGNLGYRASAKKAQICQK |
| | QVKYLGYLLKEGQRWLTEARKETVMGQPTPKTPRQLREFLGTAGFCRLWIPG |
| | FAEMAAPLYPLTKTGTLFNWGPDQQKAYQEIKQALLTAPALGLPDLTKPFELF |
| | VDEKQGYAKGVLTQKLGPWRRPVAYLSKKLDPVAAGWPPCLRMVAAIAVLT |
| | KDAGKLTMGQPLVILAPHAVEALVKQPPDRWLSNARMTHYQALLLDTDRVQ |
| | FGPVVALNPATLLPLPEEGLQHNCLDILAEAHGTRPDLTDQPLPDADHTWYTD |
| | GSSLLQEGQRKAGAAVTTETEVIWAKALPAGTSAQRAELIALTQALKMAEGK |
| | KLNVYTDSRYAFATAHIHGEIYRRRGLLTSEGKEIKNKDEILALLKALFLPKRLS |
| | IIHCPGHQKGHSAEARGNRMADQAARKAAITETPDTSTLLIENSSP (SEQ ID |
| | NO: 132) |
| PE1-C- | SGGSKRTADGSEFEPKKKRKV (SEQ ID NO: 133) |
| TERMINAL | |
| NLS | |

[0641] In another embodiment, the multi-flap prime editor fusion protein may have the following amino acid sequence (referred to herein as “PE2”), which includes a Cas9 variant comprising an H840A mutation (i.e., a Cas9 nickase) and an M-MLV RT comprising mutations D200N, T330P, L603W, T306K, and W313F, as well as an N-terminal NLS sequence (19 amino acids) and an amino acid linker (33 amino acids) that joins the C-terminus of the Cas9 nickase domain to the N-terminus of the RT domain The PE2 fusion protein has the following structure: [NLS]-[Cas9(H840A)]-[linker]-[MMLV_RT(D200N)(T330P)(L603W)(T306K)(W313F)]. The amino acid sequence of PE2 is as follows:

| | |
|---|---|
| PE2 FUSION | MKRTADGSEFESPKKKRKVDKKYSIGLDIGTNSVGWAVITDEYKVPSKKFK |
| PROTEIN | VLGNTDRHSIKKNLIGALLFDSGETAEATRLKRTARRRYTRRKNRICYLQ |
| CAS9(H840A)- | EIFSNEMAKVDDSFFHRLEESFLVEEDKKHERHPIFGNIVDEVAYHEKYPT |
| MMLV_RT | IYHLRKKLVDSTDKADLRLIYLALAHMIKFRGHFLIEGDLNPDNSDVDKL |
| D200N | FIQLVQTYNQLFEENPINASGVDAKAILSARLSKSRRLENLIAQLPGEKKN |
| T330P | GLFGNLIALSLGLTPNFKSNFDLAEDAKLQLSKDTYDDDLDNLLAQIGDQ |
| L603W | YADLFLAAKNLSDAILLSDILRVNTEITKAPLSASMIKRYDEHHQDLTLLK |
| T306K | ALVRQQLPEKYKEIFFDQSKNGYAGYIDGGASQEEFYKFIKPILEKMDGT |
| W313F | EELLVKLNREDLLRKQRTFDNGSIPHQIHLGELHAILRRQEDFYPFLKDN |
| | REKIEKILTFRIPYYVGPLARGNSRFAWMTRKSEETITPWNFEEVVDKGAS |
| | AQSFIERMTNFDKNLPNEKVLPKHSLLYEYFTVYNELTKVKYVTEGMRK |
| | PAFLSGEQKKAIVDLLFKTNRKVTVKQLKEDYFKKIECFDSVEISGVEDR |
| | FNASLGTYHDLLKIIKDKDFLDNEENEDILEDIVLTLTLFEDREMIEERLKT |
| | YAHLFDDKVMKQLKRRRYTGWGRLSRKLINGIRDKQSGKTILDFLKSDG |
| | FANRNFMQLIHDDSLTFKEDIQKAQVSGQGDSLHEHIANLAGSPAIKKGIL |
| | QTVKVVDELVKVMGRHKPENIVIEMARENQTTQKGQKNSRERMKRIEE |
| | GIKELGSQILKEHPVENTQLQNEKLYLYYLQNGRDMYVDQELDINRLSDY |
| | DVDAIVPQSFLKDDSIDNKVLTRSDKNRGKSDNVPSEEVVKKMKNYWRQ |
| | LLNAKLITQRKFDNLTKAERGGLSELDKAGFIKRQLVETRQITKHVAQIL |
| | DSRMNTKYDENDKLIREVKVITLKSKLVSDFRKDFQFYKVREINNYHHAH |
| | DAYLNAVVGTALIKKYPKLESEFVYGDYKVYDVRKMIAKSEQEIGKATAK |
| | YFFYSNIMNFFKTEITLANGEIRKRPLIETNGETGEIVWDKGRDFATVRKV |
| | LSMPQVNIVKKTEVQTGGFSKESILPKRNSDKLIARKKDWDPKKYGGFD |
| | SPTVAYSVLVVAKVEKGKSKKLKSVKELLGITIMERSSFEKNPIDFLEAKG |
| | YKEVKKDLIIKLPKYSLFELENGRKRMLASAGELQKGNELALPSKYVNFL |
| | YLASHYEKLKGSPEDNEQKQLFVEQHKHYLDEIIEQISEFSKRVILADANL |
| | DKVLSAYNKHRDKPIREQAENIIHLFTLTNLGAPAAFKYFDTTIDRKRYTS |
| | TKEVLDATLIHOSITGLYETRIDLSQLGGDSGGSSGGSSGSETPGTSESATP |
| | ESSGGSSGGSSTLNIEDEYRLHETSKEPDVSLGSTWLSDFPQAWAETGGMGLAVRQ |
| | APLIIPLKATSTPVSIKQYPMSQEARLGIKPHIQRLLDQGILVPCQSPWNTPLLPV |
| | KKPGTNDYRPVQDLREVNKRVEDIHPTVPNPYNLLSGLPPSHQWYTVLDLKDAFFC |
| | LRLHPTSQPLFAFEWRDPEMGISGQLTWTRLPQGFKNSPTLFNEALHRDLADFRI |
| | QHPDLILLQYVDDLLLAATSELDCQQGTRALLQTLGNLGYRASAKKAQICQKQVKY |
| | LGYLLKEGQRWLTEARKETVMGQPTPKTPRQLREFLGKAGFCRLFIPGFAEMAAP |
| | LYPLTKPGTLFNWGPDQQKAYQEIKQALLTAPALGLPDLTKPFELFVDEKQGYAK |
| | GVLTQKLGPWRRPVAYLSKKLDPVAAGWPPCLRMVAAIAVLTKDAGKLTMGQPLV |
| | ILAPHAVEALVKQPPDRWLSNARMTHYQALLLDTDRVQFGPWALNPATLLPLPEEG |
| | LQHNCLDILAEAHGTRPDLTDQPLPDADHTWYTDGSSLLQEGQRKAGAAVTTETEV |
| | IWAKALPAGTSAQRAELIALTQALKMAEGKKLNVYTDSRYAFATAHIHGEIYRRRG |
| | WLTSEGKEIKNKDEILALLKALFLPKRLSIIHCPGHQKGHSAEARGNRMADQAARK |
| | AAITETPDTSTLLIENSSPSGGSKRTADGSEFEPKKKRKV (SEQ ID NO: 134) |
| | KEY: |
| | NUCLEAR LOCALIZATION SEQUENCE (NLS) TOP:(SEQ ID NO: 124), |
| | BOTTOM: (SEQ ID NO: 133) |
| | CAS9(H840A) (SEQ ID NO: 137) |
| | 33-AMINO ACID LINKER (SEQ ID NO: 127) |
| | M-MLVREVERSE TRANSCRIPTASE (SEQ ID NO: 139) |
| PE2-N- | MKRTADGSEFESPKKKRKV (SEQ ID NO: 124) |
| TERMINAL | |
| NLS | |
| PE2-CAS9 | DKKYSIGLDIGTNSVGWAVITDEYKVPSKKFKVLGNTDRHSIKKNLIGALLFDS |
| (H840A) | GETAEATRLKRTARRRYTRRKNRICYLQEIFSNEMAKVDDSFFHRLEESFLVEE |
| (MET MINUS) | DKKHERHPIFGNIVDEVAYHEKYPTIYHLRKKLVDSTDKADLRLIYLALAHMI |
| | KFRGHFLIEGDLNPDNSDVDKLFIQLVQTYNQLFEENPINASGVDAKAILSARL |
| | SKSRRLENLIAQLPGEKKNGLFGNLIALSLGLTPNFKSNFDLAEDAKLQLSKDT |
| | YDDDLDNLLAQIGDQYADLFLAAKNLSDAILLSDILRVNTEITKAPLSASMIKR |
| | YDEHHQDLTLLKALVRQQLPEKYKEIFFDQSKNGYAGYIDGGASQEEFYKFIK |
| | PILEKMDGTEELLVKLNREDLLRKQRTFDNGSIPHQIHLGELHAILRRQEDFYP |
| | FLKDNREKIEKILTFRIPYYVGPLARGNSRFAWMTRKSEETITPWNFEEVVDKG |
| | ASAQSFIERMTNFDKNLPNEKVLPKHSLLYEYFTVYNELTKVKYVTEGMRKP |
| | AFLSGEQKKAIVDLLFKTNRKVTVKQLKEDYFKKIECFDSVEISGVEDRFNAS |
| | LGTYHDLLKIIKDKDFLDNEENEDILEDIVLTLTLFEDREMIEERLKTYAHLFDD |
| | KVMKQLKRRRYTGWGRLSRKLINGIRDKQSGKTILDFLKSDGFANRNFMQLI |
| | HDDSLTFKEDIQKAQVSGQGDSLHEHIANLAGSPAIKKGILQTVKVVDELVKV |
| | MGRHKPENIVIEMARENQTTQKGQKNSRERMKRIEEGIKELGSQILKEHPVEN |
| | TQLQNEKLYLYYLQNGRDMYVDQELDINRLSDYDVDAIVPQSFLKDDSIDNK |
| | VLTRSDKNRGKSDNVPSEEVVKKMKNYWRQLLNAKLITQRKFDNLTKAERG |
| | GLSELDKAGFIKRQLVETRQITKHVAQILDSRMNTKYDENDKLIREVKVITLKS |
| | KLVSDFRKDFQFYKVREINNYHHAHDAYLNAVVGTALIKKYPKLESEFVYGD |
| | YKVYDVRKMIAKSEQEIGKATAKYFFYSNIMNFFKTEITLANGEIRKRPLIETN |
| | GETGEIVWDKGRDFATVRKVLSMPQVNIVKKTEVQTGGFSKESILPKRNSDKL |
| | IARKKDWDPKKYGGFDSPTVAYSVLVVAKVEKGKSKKLKSVKELLGITIMERS |
| | SFEKNPIDFLEAKGYKEVKKDLIIKLPKYSLFELENGRKRMLASAGELQKGNE |
| | LALPSKYVNFLYLASHYEKLKGSPEDNEQKQLFVEQHKHYLDEIIEQISEFSKR |
| | VILADANLDKVLSAYNKHRDKPIREQAENIIHLFTLTNLGAPAAFKYFDTTIDR |
| | KRYTSTKEVLDATLIHQSITGLYETRIDLSQLGGD (SEQ ID NO: 141) |
| PE2-LINKER | SGGSSGGSSGSETPGTSESATPESSGGSSGGSS (SEQ ID NO: 127) |
| BETWEEN | |
| CAS9 | |
| DOMAIN | |
| ANDRT | |
| DOMAIN | |
| (33 AMINO | |
| ACIDS) | |
| PE2- | TLNIEDEYRLHETSKEPDVSLGSTWLSDFPQAWAETGGMGLAVRQAPLIIPLK |
| MMLV_RT | ATSTPVSIKQYPMSQEARLGIKPHIQRLLDQGILVPCQSPWNTPLLPVKKPGTN |
| D200N | DYRPVQDLREVNKRVEDIHPTVPNPYNLLSGLPPSHQWYTVLDLKDAFFCLR |
| T330P | LHPTSQPLFAFEWRDPEMGISGQLTWTRLPQGFKNSPTLFNEALHRDLADFRI |
| L603W | QHPDLILLQYVDDLLLAATSELDCQQGTRALLQTLGNLGYRASAKKAQICQK |
| T306K | QVKYLGYLLKEGQRWLTEARKETVMGQPTPKTPRQLREFLGKAGFCRLFIPG |
| W313F | FAEMAAPLYPLTKPGTLFNWGPDQQKAYQEIKQALLTAPALGLPDLTKPFELF |
| | VDEKQGYAKGVLTQKLGPWRRPVAYLSKKLDPVAAGWPPCLRMVAAIAVLT |
| | KDAGKLTMGQPLVILAPHAVEALVKQPPDRWLSNARMTHYQALLLDTDRVQ |
| | FGPVVALNPATLLPLPEEGLQHNCLDILAEAHGTRPDLTDQPLPDADHTWYTD |
| | GSSLLQEGQRKAGAAVTTETEVIWAKALPAGTSAQRAELIALTQALKMAEGK |
| | KLNVYTDSRYAFATAHIHGEIYRRRGWLTSEGKEIKNKDEILALLKALFLPKRL |
| | SIIHCPGHQKGHSAEARGNRMADQAARKAAITETPDTSTLLIENSSP (SEQ ID |
| | NO: 143) |
| PE2-C- | SGGSKRTADGSEFEPKKKRKV (SEQ ID NO: 133) |
| TERMINAL | |
| NLS | |

[0642] In still other embodiments, the prime editor fusion protein may have the following amino acid sequences:

| | |
|---|---|
| PE FUSION | MKRYADGSEEESPKKKRKVTLNIEDEYRLHETSKEPDVSLGSTWLSDFPQAWAETG |
| PROTEIN | GMGLAVRQAPLIIPLKATSTPVSIKQYPMSQEARLGIKPHIQRLLDQGILVPCQSP |
| MMLV_RT | WNTPLLPVKKPGTNDYRPVQDLREVNKRVEDIHPTVPNPYNLLSGLPPSHQWYTV |
| (WT)-32AA- | LDLKDAFFCLRLHPTSQPLFAFEWRDPEMGISGQLTWTRLPQGFKNSPTLFDEAL |
| CAS9(H840A) | HRDLADFRIQHPDLILLQYVDDLLLAATSELDCQQGTRALLQTLGNLGYRASAKKA |
| | QICQKQVKYLGYLLKEGQRWLTEARKETVMGQPTPKTPRQLREFLGTAGFCRLWI |
| | PGFAEMAAPLYPLTKTGTLFNWGPDQQKAYQEIKQALLTAPALGLPDLTKPFELFV |
| | DEKQGYAKGVLTQKLGPWRRPVAYLSKKLDPVAAGWPPCLRMVAAIAVLTKDAGK |
| | LTMGQPLVILAPHAVEALVKQPPDRWLSNARMTHYQALLLDTDRVQFGPWALNP |
| | ATLLPLPEEGLQHNCLDILAEAHGTRPDLTDQPLPDADHTWYTDGSSLLQEGQRKA |
| | GAAVTTETEVIWAKALPAGTSAQRAELIALTQALKMAEGKKLNVYTDSRYAFATAHI |
| | HGEIYRRRGLLTSEGKEIKNKDEILALLKALFLPKRLSHHCPGHQKGHSAEARGNR |
| | MADQAARKAAITETPDTSTLLIENSSPSGGSSGGSSGSETPGTSESATPESSGGS |
| | SGGSSDKKYSIGLDIGTNSVGWAVITDEYKVPSKKFKVLGNTDRHSIKKNL |
| | IGALLFDSGETAEATRLKRTARRRYTRRKNRICYLQEIFSNEMAKVDDSFF |
| | HRLEESFLVEEDKKHERHPIFGNIVDEVAYHEKYPTIYHLRKKLVDSTDKA |
| | DLRLIYLALAHMIKFRGHFLIEGDLNPDNSDVDKLFIQLVQTYNQLFEENP |
| | INASGVDAKAILSARLSKSRRLENLIAQLPGEKKNGLFGNLIALSLGLTPN |
| | FKSNFDLAEDAKLQLSKDTYDDDLDNLLAQIGDQYADLFLAAKNLSDAIL |
| | LSDILRYNTEITKAPLSASMIKRYDEHHQDLTLLKALVRQQLPEKYKEIFF |
| | DQSKNGYAGYIDGGASQEEFYKFIKPILEKMDGTEELLVKLNREDLLRKQ |
| | RTFDNGSIPHQIHLGELHAILRRQEDFYPFLKDNREKIEKILTFRIPYYVGP |
| | LARGNSRFAWMTRKSEETITPWNFEEVVDKGASAQSFIERMTNFDKNLP |
| | NEKVLPKHSLLYEYFTVYNELTKVKYVTEGMRKPAFLSGEQKKAIVDLLF |
| | KTNRKVTVKQLKEDYFKKIECFDSVEISGVEDRFNASLGTYHDLLKIIKD |
| | KDFLDNEENEDILEDIVLTLTLFEDREMIEERLKTYAHLFDDKVMKQLKR |
| | RRYTGWGRLSRKLINGIRDKQSGKTILDFLKSDGFANRNFMQLIHDDSLT |
| | FKEDIQKAQVSGQGDSLHEHIANLAGSPAIKKGILQTVKVVDELVKVMGR |
| | HKPENIVIEMARENQTTQKGQKNSRERMKRIEEGIKELGSQILKEHPVEN |
| | TQLQNEKLYLYYLQNGRDMYVDQELDINRLSDYDVDAIVPQSFLKDDSID |
| | NKVLTRSDKNRGKSDNVPSEEVVKKMKNYWRQLLNAKLITQRKFDNLT |
| | KAERGGLSELDKAGFIKRQLVETRQITKHVAQILDSRMNTKYDENDKLIR |
| | EVKVITLKSKLVSDFRKDFQFYKVREINNYHHAHDAYLNAVVGTALIKKY |
| | PKLESEFVYGDYKVYDVRKMIAKSEQEIGKATAKYFFYSNIMNFFKTEITL |
| | ANGEIRKRPLIETNGETGEIVWDKGRDFATVRKVLSMPQVNIVKKTEVQT |
| | GGFSKESILPKRNSDKLIARKKDWDPKKYGGFDSPTVAYSVLVVAKVEKG |
| | KSKKLKSVKELLGITIMERSSFEKNPIDFLEAKGYKEVKKDLIIKLPKYSL |
| | FELENGRKRMLASAGELQKGNELALPSKYVNFLYLASHYEKLKGSPEDN |
| | EQKQLFVEQHKHYLDEIIEQISEFSKRVILADANLDKVLSAYNKHRDKPIR |
| | EQAENIIHLFTLTNLGAPAAFKYFDTTIDRKRYTSTKEVLDATLIHQSITGL |
| | YETRIDLSQLGGDSGGSKRTADGSEFEPKKKRKV (SEQ ID NO: 145) |
| | KEY: |
| | NUCLEAR LOCALIZATION SEQUENCE (NLS) TOP:(SEQ ID NO: 124), |
| | BOTTOM: (SEQ ID NO: 133) |
| | CAS9(H840A) (SEQ ID NO: 147) |
| | 33-AMINO ACID LINKER (SEQ ID NO: 127) |
| | M-MLVREVERSE TRANSCRIPTASE (SEQ ID NO: 149) |
| PE FUSION | MKRTADGSEEESPKKKRKVTLNIEDEYRLHETSKEPDVSLGSTWLSDFPQAWAET |
| PROTEIN | GGMGLAVRQAPLIIPLKATSTPVSIKQYPMSQEARLGIKPHIQRLLDQGILVPCQSP |
| MMLV_RT | WNTPLLPVKKPGTNDYRPVQDLREVNKRVEDIHPTVPNPYNLLSGLPPSHQWYTV |
| (WT)-60AA- | LDLKDAFFCLRLHPTSQPLFAFEWRDPEMGISGQLTWTRLPQGFKNSPTLFDEAL |
| CAS9(H840A) | HRDLADFRIQHPDLILLQYVDDLLLAATSELDCQQGTRALLQTLGNLGYRASAKKA |
| | QICQKQVKYLGYLLKEGQRWLTEARKETVMGQPTPKTPRQLREFLGTAGFCRLWI |
| | PGFAEMAAPLYPLTKTGTLFNWGPDQQKAYQEIKQALLTAPALGLPDLTKPFELFV |
| | DEKQGYAKGVLTQKLGPWRRPVAYLSKKLDPVAAGWPPCLRMVAAIAVLTKDAGK |
| | LTMGQPLVILAPHAVEALVKQPPDRWLSNARMTHYQALLLDTDRVQFGPWALNP |
| | ATLLPLPEEGLQHNCLDILAEAHGTRPDLTDQPLPDADHTWYTDGSSLLQEGQRKA |
| | GAAVTTETEVIWAKALPAGTSAQRAELIALTQALKMAEGKKLNVYTDSRYAFATAHI |
| | HGEIYRRRGLLTSEGKEIKNKDEILALLKALFLPKRLSHHCPGHQKGHSAEARGNR |
| | MADQAARKAAITETPDTSTLLIENSSPSGGSSGGSSGSETVGTSESATVESAGSN |
| | PYDVPDYAGSAAPAAKKKKLDGSGSGGSSGGSDKKYSIGLDIGTNSVGWA |
| | VITDEYKVPSKKFKVLGNTDRHSIKKNLIGALLFDSGETAEATRLKRTARR |
| | RYTRRKNRICYLQEIFSNEMAKVDDSFFHRLEESFLVEEDKKHERHPIFG |
| | NIVDEVAYHEKYPTIYHLRKKLVDSTDKADLRLIYLALAHMIKFRGHFLIE |
| | GDLNPDNSDVDKLFIQLVQTYNQLFEENPINASGVDAKAILSARLSKSRRL |
| | ENLIAQLPGEKKNGLFGNLIALSLGLTPNFKSNFDLAEDAKLQLSKDTYD |
| | DDLDNLLAQIGDQYADLFLAAKNLSDAILLSDILRVNTEITKAPLSASMIK |
| | RYDEHHQDLTLLKALVRQQLPEKYKEIFFDQSKNGYAGYIDGGASQEEFY |
| | KFIKPILEKMDGTEELLVKLNREDLLRKQRTFDNGSIPHQIHLGELHAILR |
| | RQEDFYPFLKDNREKIEKILTFRIPYYVGPLARGNSRFAWMTRKSEETITP |
| | WNFEEVVDKGASAQSFIERMTNFDKNLPNEKVLPKHSLLYEYFTVYNELT |
| | KVKYVTEGMRKPAFLSGEQKKAIVDLLFKTNRKVTVKQLKEDYFKKIEC |
| | FDSVEISGVEDRFNASLGTYHDLLKIIKDKDFLDNEENEDILEDIVLTLTLF |
| | EDREMIEERLKTYAHLFDDKVMKQLKRRRYTGWGRLSRKLINGIRDKQS |
| | GKTILDFLKSDGFANRNFMQLIHDDSLTFKEDIQKAQVSGQGDSLHEHIA |
| | NLAGSPAIKKGILQTVKVVDELVKVMGRHKPENIVIEMARENQTTQKGQ |
| | KNSRERMKRIEEGIKELGSQILKEHPVENTQLQNEKLYLYYLQNGRDMY |
| | VDQELDINRLSDYDVDAIVPQSFLKDDSIDNKVLTRSDKNRGKSDNVPSEE |
| | VVKKMKNYWRQLLNAKLITQRKFDNLTKAERGGLSELDKAGFIKRQLV |
| | ETRQITKHVAQILDSRMNTKYDENDKLIREVKVITLKSKLVSDFRKDFQF |
| | YKVREINNYHHAHDAYLNAVVGTALIKKYPKLESEFVYGDYKVYDVRKM |
| | IAKSEQEIGKATAKYFFYSNIMNFFKTEITLANGEIRKRPLIETNGETGEIV |
| | WDKGRDFATVRKVLSMPQVNIVKKTEVQTGGFSKESILPKRNSDKLIARK |
| | KDWDPKKYGGFDSPTVAYSVLVVAKVEKGKSKKLKSVKELLGITIMERSS |
| | FEKNPIDFLEAKGYKEVKKDLIIKLPKYSLFELENGRKRMLASAGELQKG |
| | NELALPSKYVNFLYLASHYEKLKGSPEDNEQKQLFVEQHKHYLDEIIEQIS |
| | EFSKRVILADANLDKVLSAYNKHRDKPIREQAENIIHLFTLTNLGAPAAFK |
| | YFDTTIDRKRYTSTKEVLDATLIHQSITGLYETRIDLSQLGGDSGGSKRTAD |
| | GSEFEPKKKRKV (SEQ ID NO: 150) |
| | KEY: |
| | NUCLEAR LOCALIZATION SEQUENCE (NLS) TOP:(SEQ ID NO: 124), |
| | BOTTOM: (SEQ ID NO: 133) |
| | CAS9(H840A)(SEQ ID NO: 153) |
| | AMINO ACID LINKER (SEQ ID NO: 175) |
| | M-MLVREVERSE TRANSCRIPTASE (SEQ ID NO: 149) |
| PE FUSION | MKRTADGSEFESPKKKRKVDKKYSIGLDIGTNSVGWAVITDEYKVPSKKFK |
| PROTEIN | VLGNTDRHSIKKNLIGALLFDSGETAEATRLKRTARRRYTRRKNRICYLQ |
| CAS9(H840A)- | EIFSNEMAKYDDSFFHRLEESFLVEEDKKHERHPIFGNIVDEVAYHEKYPT |
| FEN1- | IYHLRKKLVDSTDKADLRLIYLALAHMIKFRGHFLIEGDLNPDNSDVDKL |
| MMLV_RT | FIQLVQTYNQLFEENPINASGVDAKAILSARLSKSRRLENLIAQLPGEKKN |
| D200N | GLFGNLIALSLGLTPNFKSNFDLAEDAKLQLSKDTYDDDLDNLLAQIGDQ |
| T330P | YADLFLAAKNLSDAILLSDILRVNTEITKAPLSASMIKRYDEHHQDLTLLK |
| L603W | ALVRQQLPEKYKEIFFDQSKNGYAGYIDGGASQEEFYKFIKPILEKMDGT |
| T306K | EELLVKLNREDLLRKQRTFDNGSIPHQIHLGELHAILRRQEDFYPFLKDN |
| W313F | REKIEKILTFRIPYYVGPLARGNSRFAWMTRKSEETITPWNFEEVVDKGAS |
| | AQSFIERMTNFDKNLPNEKVLPKHSLLYEYFTVYNELTKVKYVTEGMRK |
| | PAFLSGEQKKAIVDLLFKTNRKVTVKQLKEDYFKKIECFDSVEISGVEDR |
| | FNASLGTYHDLLKIIKDKDFLDNEENEDILEDIVLTLTLFEDREMIEERLKT |
| | YAHLFDDKVMKQLKRRRYTGWGRLSRKLINGIRDKQSGKTILDFLKSDG |
| | FANRNFMQLIHDDSLTFKEDIQKAQVSGQGDSLHEHIANLAGSPAIKKGIL |
| | QTVKVVDELVKVMGRHKPENIVIEMARENQTTQKGQKNSRERMKRIEE |
| | GIKELGSQILKEHPVENTQLQNEKLYLYYLQNGRDMYVDQELDINRLSDY |
| | DVDAIVPQSFLKDDSIDNKVLTRSDKNRGKSDNVPSEEVVKKMKNYWRQ |
| | LLNAKLITQRKFDNLTKAERGGLSELDKAGFIKRQLVETRQITKHVAQIL |
| | DSRMNTKYDENDKLIREVKVITLKSKLVSDFRKDFQFYKVREINNYHHAH |
| | DAYLNAVVGTALIKKYPKLESEFVYGDYKVYDVRKMIAKSEQEIGKATAK |
| | YFFYSNIMNFFKTEITLANGEIRKRPLIETNGETGEIVWDKGRDFATVRKV |
| | LSMPQVNIVKKTEVQTGGFSKESILPKRNSDKLIARKKDWDPKKYGGFD |
| | SPTVAYSVLVVAKVEKGKSKKLKSVKELLGITIMERSSFEKNPIDFLEAKG |
| | YKEVKKDLIIKLPKYSLFELENGRKRMLASAGELQKGNELALPSKYVNFL |
| | YLASHYEKLKGSPEDNEQKQLFVEQHKHYLDEIIEQISEFSKRVILADANL |
| | DKVLSAYNKHRDKPIREQAENIIHLFTLTNLGAPAAFKYFDTTIDRKRYTS |
| | TKEVLDATLIHQSITGLYETRIDLSQLGGDSGGSSGGSSGSETPGTSESATP |
| | ESSGGSSGGSSGIOGLAKLIADVAPSAIRENDIKSYFGRKVAIDASMSIYQFLIA |
| | VRQGGDVLQNEEGETTSHLMGMFYRTIRMMENGIKPVYVFDGKPPQLKSGE |
| | LAKRSERRAEAEKQLQQAQAAGAEQEVEKFTKRLVKVTKQHNDECKHLLSL |
| | MGIPYLDAPSEAEASCAALVKAGKVYAAATEDMDCLTFGSPVLMRHLTASEA |
| | KKLPIQEFHLSRILQELGLNQEQFVDLCILLGSDYCESIRGIGPKRAVDLIQKHK |
| | SIEEIVRRLDPNKYPVPENWLHKEAHQLFLEPEVLDPESVELKWSEPNEEELIK |
| | FMCGEKQFSEERIRSGVKRLSKSRQGSTQGRLDDFFKVTGSLSSAKRKEPEPK |
| | GSTKKKAKTGAAGKFKRGKSGGSSGGSSGSETPGTSESATPESSGGSSGGSS |
| | TLNIEDEYRLHETSKEPDVSLGSTWLSDFPQAWAETGGMGLAVRQAPLIIPLKATST |
| | PVSIKQYPMSQEARLGIKPHIQRLLDQGILVPCQSPWNTPLLPVKKPGTNDYRPVQ |
| | DLREVNKRVEDIHPTVPNPYNLLSGLPPSHQWYTVLDLKDAFFCLRLHPTSQPLFA |
| | FEWRDPEMGISGQLTWTRLPQGFKNSPTLFNEALHRDLADFRIQHPDLILLQYVD |
| | DLLLAATSELDCQQGTRALLQTLGNLGYRASAKKAQICQKQVKYLGYLLKEGQRW |
| | LTEARKETVMGQPTPKTPRQLREFLGKAGFCRLFIPGFAEMAAPLYPLTKPGTLFN |
| | WGPDQQKAYQEIKQALLTAPALGLPDLTKPFELFVDEKQGYAKGVLTQKLGPWRR |
| | PVAYLSKKLDPVAAGWPPCLRMVAAIAVLTKDAGKLTMGQPLVILAPHAVEALVKQ |
| | PPDRWLSNARMTHYQALLLDTDRVQFGPWALNPATLLPLPEEGLQHNCLDILAEA |
| | HGTRPDLTDQPLPDADHTWYTDGSSLLQEGQRKAGAAVTTETEVIWAKALPAGTSA |
| | QRAELIALTQALKMAEGKKLNVYTDSRYAFATAHIHGEIYRRRGWLTSEGKEIKNK |
| | DEILALLKALFLPKRLSHHCPGHQKGHSAEARGNRMADQAARKAAITETPDTSTLL |
| | IENSSPSGGSKRTADGSEFEPKKKRKV (SEQIDNO: 154) |
| | KEY: |
| | NUCLEAR LOCALIZATION SEQUENCE (NLS) TOP:(SEQ ID NO: 124), |
| | BOTTOM: (SEQ ID NO: 133) |
| | CAS9(H840A) (SEQ ID NO: 157) |
| | 33-AMINO ACID LINKER 1 (SEQ ID NO: 127) |
| | M-MLVREVERSE TRANSCRIPTASE (SEQ ID NO: 159) |
| | 33-AMINO ACID LINKER 2 (SEQ ID NO: 127) |
| | FEN1 (SEQ ID NO: 161) |

[0643] In other embodiments, the multi-flap prime editor fusion proteins can be based on SaCas9 or on SpCas9 nickases with altered PAM specificities, such as the following exemplary sequences:

| | |
|---|---|
| SACAS9-M-MLV RT | MKRTADGSEFESPKKKRKVGKRNYILGLDIGITSVGYGIIDYETRDVID |
| PRIME EDITOR | AGVRLFKEANVENNEGRRSKRGARRLKRRRRHRIQRVKKLLFDYNLL |
| | TDHSELSGINPYEARVKGLSQKLSEEEFSAALLHLAKRRGVHNVNEVE |
| | EDTGNELSTKEQISRNSKALEEKYVAELQLERLKKDGEVRGSINRFKT |
| | SDYVKEAKQLLKVQKAYHQLDQSFIDTYIDLLETRRTYYEGPGEGSPF |
| | GWKDIKEWYEMLMGHCTYFPEELRSVKYAYNADLYNALNDLNNLVI |
| | TRDENEKLEYYEKFQIIENVFKQKKKPTLKQIAKEILVNEEDIKGYRVT |
| | STGKPEFTNLKVYHDIKDITARKEIIENAELLDQIAKILTIYQSSEDIQEE |
| | LTNLNSELTQEEIEQISNLKGYTGTHNLSLKAINLILDELWHTNDNQIAI |
| | FNRLKLVPKKVDLSQQKEIPTTLVDDFILSPVVKRSFIQSIKVINAIIKKY |
| | GLPNDIIIELAREKNSKDAQKMINEMQKRNRQTNERIEEIIRTTGKENA |
| | KYLIEKIKLHDMQEGKCLYSLEAIPLEDLLNNPFNYEVDHIIPRSVSFD |
| | NSFNNKVLVKQEEASKKGNRTPFQYLSSSDSKISYETFKKHILNLAKG |
| | KGRISKTKKEYLLEERDINRFSVQKDFINRNLVDTRYATRGLMNLLRS |
| | YFRVNNLDVKVKSINGGFTSFLRRKWKFKKERNKGYKHHAEDALIIA |
| | NADFIFKEWKKLDKAKKVMENQMFEEKQAESMPEIETEQEYKEIFITP |
| | HQIKHIKDFKDYKYSHRVDKKPNRELINDTLYSTRKDDKGNTLIVNNL |
| | NGLYDKDNDKLKKLINKSPEKLLMYHHDPQTYQKLKLIMEQYGDEK |
| | NPLYKYYEETGNYLTKYSKKDNGPVIKKIKYYGNKLNAHLDITDDYP |
| | NSRNKVVKLSLKPYRFDVYLDNGVYKFVTVKNLDVIKKENYYEVNS |
| | KCYEEAKKLKKISNQAEFIASFYNNDLIKINGELYRVIGVNNDLLNRIE |
| | VNMIDITYREYLENMNDKRPPRIIKTIASKTQSIKKYSTDILGNLYEVK |
| | SKKHPQIIKKGSGGSSGGSSGSETPGTSESATPESSGGSSGGSSTLNIED |
| | EYRLHETSKEPDVSLGSTWLSDFPQAWAETGGMGLAVRQAPLIIPLKA |
| | TSTPVSIKQYPMSQEARLGIKPHIQRLLDQGILVPCQSPWNTPLLPVKK |
| | PGTNDYRPVQDLREVNKRVEDIHPTVPNPYNLLSGLPPSHQWYTVLD |
| | LKDAFFCLRLHPTSQPLFAFEWRDPEMGISGQLTWTRLPQGFKNSPTL |
| | FDEALHRDLADFRIQHPDLILLQYVDDLLLAATSELDCQQGTRALLQT |
| | LGNLGYRASAKKAQICQKQVKYLGYLLKEGQRWLTEARKETVMGQP |
| | TPKTPRQLREFLGTAGFCRLWIPGFAEMAAPLYPLTKTGTLFNWGPDQ |
| | QKAYQEIKQALLTAPALGLPDLTKPFELFVDEKQGYAKGVLTQKLGPW |
| | RRPVAYLSKKLDPVAAGWPPCLRMVAAIAVLTKDAGKLTMGQPLVIL |
| | APHAVEALVKQPPDRWLSNARMTHYQALLLDTDRVQFGPVVALNPAT |
| | LLPLPEEGLQHNCLDILAEAHGTRPDLTDQPLPDADHTWYTDGSSLLQ |
| | EGQRKAGAAVTTETEVIWAKALPAGTSAQRAELIALTQALKMAEGKK |
| | LNVYTDSRYAFATAHIHGEIYRRRGLLTSEGKEIKNKDEILALLKALFLP |
| | KRLSIIHCPGHQKGHSAEARGNRMADQAARKAAITETPDTSTLLIENS |
| | SPSGGSKRTADGSEFEPKKKRKV (SEQ ID NO: 162) |
| SPCAS9(H840A)- | MKRTADGSEFESPKKKRKVDKKYSIGLDIGTNSVGWAVITDEYKVPSK |
| VRQR-MALONEY | KFKVLGNTDRHSIKKNLIGALLFDSGETAEATRLKRTARRRYTRRKNR |
| MURINE | ICYLQEIFSNEMAKVDDSFFHRLEESFLVEEDKKHERHPIFGNIVDEVA |
| LEUKEMIA VIRUS | YHEKYPTIYHLRKKLVDSTDKADLRLIYLALAHMIKFRGHFLIEGDLN |
| REVERSE | PDNSDVDKLFIQLVQTYNQLFEENPINASGVDAKAILSARLSKSRRLE |
| TRANSCRIPTASE | NLIAQLPGEKKNGLFGNLIALSLGLTPNFKSNFDLAEDAKLQLSKDTY |
| PRIME EDITOR | DDDLDNLLAQIGDQYADLFLAAKNLSDAILLSDILRVNTEITKAPLSAS |
| | MIKRYDEHHQDLTLLKALVRQQLPEKYKEIFFDQSKNGYAGYIDGGA |
| | SQEEFYKFIKPILEKMDGTEELLVKLNREDLLRKQRTFDNGSIPHQIHL |
| | GELHAILRRQEDFYPFLKDNREKIEKILTFRIPYYVGPLARGNSRFAWM |
| | TRKSEETITPWNFEEVVDKGASAQSFIERMTNFDKNLPNEKVLPKHSL |
| | LYEYFTVYNELTKVKYVTEGMRKPAFLSGEQKKAIVDLLFKTNRKVT |
| | VKQLKEDYFKKIECFDSVEISGVEDRFNASLGTYHDLLKIIKDKDFLD |
| | NEENEDILEDIVLTLTLFEDREMIEERLKTYAHLFDDKVMKQLKRRRY |
| | TGWGRLSRKLINGIRDKQSGKTILDFLKSDGFANRNFMQLIHDDSLTF |
| | KEDIQKAQVSGQGDSLHEHIANLAGSPAIKKGILQTVKVVDELVKVM |
| | GRHKPENIVIEMARENQTTQKGQKNSRERMKRIEEGIKELGSQILKEH |
| | PVENTQLQNEKLYLYYLQNGRDMYVDQELDINRLSDYDVDAIVPQSF |
| | LKDDSIDNKVLTRSDKNRGKSDNVPSEEVVKKMKNYWRQLLNAKLI |
| | TQRKFDNLTKAERGGLSELDKAGFIKRQLVETRQITKHVAQILDSRMN |
| | TKYDENDKLIREVKVITLKSKLVSDFRKDFQFYKVREINNYHHAHDA |
| | YLNAVVGTALIKKYPKLESEFVYGDYKVYDVRKMIAKSEQEIGKATA |
| | KYFFYSNIMNFFKTEITLANGEIRKRPLIETNGETGEIVWDKGRDFATV |
| | RKVLSMPQVNIVKKTEVQTGGFSKESILPKRNSDKLIARKKDWDPKK |
| | YGGFVSPTVAYSVLVVAKVEKGKSKKLKSVKELLGITIMERSSFEKNPI |
| | DFLEAKGYKEVKKDLIIKLPKYSLFELENGRKRMLASARELQKGNEL |
| | ALPSKYVNFLYLASHYEKLKGSPEDNEQKQLFVEQHKHYLDEIIEQIS |
| | EFSKRVILADANLDKVLSAYNKHRDKPIREQAENIIHLFTLTNLGAPAA |
| | FKYFDTTIDRKQYRSTKEVLDATLIHQSITGLYETRIDLSQLGGDSGGS |
| | SGGSSGSETPGTSESATPESSGGSSGGSSTLNIEDEYRLHETSKEPDVSL |
| | GSTWLSDFPQAWAETGGMGLAVRQAPLIIPLKATSTPVSIKQYPMSQE |
| | ARLGIKPHIQRLLDQGILVPCQSPWNTPLLPVKKPGTNDYRPVQDLRE |
| | VNKRVEDIHPTVPNPYNLLSGLPPSHQWYTVLDLKDAFFCLRLHPTSQ |
| | PLFAFEWRDPEMGISGQLTWTRLPQGFKNSPTLFNEALHRDLADFRIQ |
| | HPDLILLQYVDDLLLAATSELDCQQGTRALLQTLGNLGYRASAKKAQ |
| | ICQKQVKYLGYLLKEGQRWLTEARKETVMGQPTPKTPRQLREFLGKA |
| | GFCRLFIPGFAEMAAPLYPLTKPGTLFNWGPDQQKAYQEIKQALLTAP |
| | ALGLPDLTKPFELFVDEKQGYAKGVLTQKLGPWRRPVAYLSKKLDPV |
| | AAGWPPCLRMVAAIAVLTKDAGKLTMGQPLVILAPHAVEALVKQPPD |
| | RWLSNARMTHYQALLLDTDRVQFGPVVALNPATLLPLPEEGLQHNCL |
| | DILAEAHGTRPDLTDQPLPDADHTWYTDGSSLLQEGQRKAGAAVTTE |
| | TEVIWAKALPAGTSAQRAELIALTQALKMAEGKKLNVYTDSRYAFAT |
| | AHIHGEIYRRRGWLTSEGKEIKNKDEILALLKALFLPKRLSIIHCPGHQ |
| | KGHSAEARGNRMADQAARKAAITETPDTSTLLIENSSPSGGSKRTADG |
| | SEFEPKKKRKV (SEQ ID NO: 163) |
| SPCAS9(H840A)- | MKRTADGSEFESPKKKRKVDKKYSIGLDIGTNSVGWAVITDEYKVPSK |
| VRER-MALONEY | KFKVLGNTDRHSIKKNLIGALLFDSGETAEATRLKRTARRRYTRRKNR |
| MURINE | ICYLQEIFSNEMAKVDDSFFHRLEESFLVEEDKKHERHPIFGNIVDEVA |
| LEUKEMIA VIRUS | YHEKYPTIYHLRKKLVDSTDKADLRLIYLALAHMIKFRGHFLIEGDLN |
| REVERSE | PDNSDVDKLFIQLVQTYNQLFEENPINASGVDAKAILSARLSKSRRLE |
| TRANSCRIPTASE | NLIAQLPGEKKNGLFGNLIALSLGLTPNFKSNFDLAEDAKLQLSKDTY |
| PRIME EDITOR | DDDLDNLLAQIGDQYADLFLAAKNLSDAILLSDILRVNTEITKAPLSAS |
| | MIKRYDEHHQDLTLLKALVRQQLPEKYKEIFFDQSKNGYAGYIDGGA |
| | SQEEFYKFIKPILEKMDGTEELLVKLNREDLLRKQRTFDNGSIPHQIHL |
| | GELHAILRRQEDFYPFLKDNREKIEKILTFRIPYYVGPLARGNSRFAWM |
| | TRKSEETITPWNFEEVVDKGASAQSFIERMTNFDKNLPNEKVLPKHSL |
| | LYEYFTVYNELTKVKYVTEGMRKPAFLSGEQKKAIVDLLFKTNRKVT |
| | VKQLKEDYFKKIECFDSVEISGVEDRFNASLGTYHDLLKIIKDKDFLD |
| | NEENEDILEDIVLTLTLFEDREMIEERLKTYAHLFDDKVMKQLKRRRY |
| | TGWGRLSRKLINGIRDKQSGKTILDFLKSDGFANRNFMQLIHDDSLTF |
| | KEDIQKAQVSGQGDSLHEHIANLAGSPAIKKGILQTVKVVDELVKVM |
| | GRHKPENIVIEMARENQTTQKGQKNSRERMKRIEEGIKELGSQILKEH |
| | PVENTQLQNEKLYLYYLQNGRDMYVDQELDINRLSDYDVDAIVPQSF |
| | LKDDSIDNKVLTRSDKNRGKSDNVPSEEVVKKMKNYWRQLLNAKLI |
| | TQRKFDNLTKAERGGLSELDKAGFIKRQLVETRQITKHVAQILDSRMN |
| | TKYDENDKLIREVKVITLKSKLVSDFRKDFQFYKVREINNYHHAHDA |
| | YLNAVVGTALIKKYPKLESEFVYGDYKVYDVRKMIAKSEQEIGKATA |
| | KYFFYSNIMNFFKTEITLANGEIRKRPLIETNGETGEIVWDKGRDFATV |
| | RKVLSMPQVNIVKKTEVQTGGFSKESILPKRNSDKLIARKKDWDPKK |
| | YGGFVSPTVAYSVLVVAKVEKGKSKKLKSVKELLGITIMERSSFEKNPI |
| | DFLEAKGYKEVKKDLIIKLPKYSLFELENGRKRMLASARELQKGNEL |
| | ALPSKYVNFLYLASHYEKLKGSPEDNEQKQLFVEQHKHYLDEIIEQIS |
| | EFSKRVILADANLDKVLSAYNKHRDKPIREQAENIIHLFTLTNLGAPAA |
| | FKYFDTTIDRKEYRSTKEVLDATLIHQSITGLYETRIDLSQLGGDSGGSS |
| | GGSSGSETPGTSESATPESSGGSSGGSSTLNIEDEYRLHETSKEPDVSLG |
| | STWLSDFPQAWAETGGMGLAVRQAPLIIPLKATSTPVSIKQYPMSQEA |
| | RLGIKPHIQRLLDQGILVPCQSPWNTPLLPVKKPGTNDYRPVQDLREV |
| | NKRVEDIHPTVPNPYNLLSGLPPSHQWYTVLDLKDAFFCLRLHPTSQP |
| | LFAFEWRDPEMGISGQLTWTRLPQGFKNSPTLFNEALHRDLADFRIQH |
| | PDLILLQYVDDLLLAATSELDCQQGTRALLQTLGNLGYRASAKKAQI |
| | CQKQVKYLGYLLKEGQRWLTEARKETVMGQPTPKTPRQLREFLGKA |
| | GFCRLFIPGFAEMAAPLYPLTKPGTLFNWGPDQQKAYQEIKQALLTAP |
| | ALGLPDLTKPFELFVDEKQGYAKGVLTQKLGPWRRPVAYLSKKLDPV |
| | AAGWPPCLRMVAAIAVLTKDAGKLTMGQPLVILAPHAVEALVKQPPD |
| | RWLSNARMTHYQALLLDTDRVQFGPVVALNPATLLPLPEEGLQHNCL |
| | DILAEAHGTRPDLTDQPLPDADHTWYTDGSSLLQEGQRKAGAAVTTE |
| | TEVIWAKALPAGTSAQRAELIALTQALKMAEGKKLNVYTDSRYAFAT |
| | AHIHGEIYRRRGWLTSEGKEIKNKDEILALLKALFLPKRLSIIHCPGHQ |
| | KGHSAEARGNRMADQAARKAAITETPDTSTLLIENSSPSGGSKRTADG |
| | SEFEPKKKRKV (SEQ ID NO: 164) |

[0644] In yet other embodiments, the multi-flap prime editor fusion proteins contemplated herein may include a Cas9 nickase (e.g., Cas9 (H840A)) fused to a truncated version of M-MLV reverse transcriptase. In this embodiment, the reverse transcriptase also contains 4 mutations (D200N, T306K, W313F, T330P; noting that the L603W mutation present in PE2 is no longer present due to the truncation). The DNA sequence encoding this truncated editor is 522 bp smaller than PE2, and therefore makes its potentially useful for applications where delivery of the DNA sequence is challenging due to its size (i.e. adeno-associated virus and lentivirus delivery). This embodiment is referred to as Cas9(H840A)-MMLV-RT(trunc) or “PE2-short”or “PE2-trunc” and has the following amino acid sequence:

| | |
|---|---|
| CAS9(H840A)- | MKRTADGSEFESPKKKRKVDKKYSIGLDIGTNSVGWAVITDEYKVP |
| MMLV-RT(TRUNC) | SKKFKYLGNTDRHSIKKNLIGALLFDSGETAEATRLKRTARRRYT |
| OR PE2-SHORT | RRKNRICYLQEIFSNEMAKVDDSFFHRLEESFLVEEDKKHERHPIF |
| | GNIVDEVAYHEKYPTIYHLRKKLVDSTDKADLRLIYLALAHMIKF |
| | RGHFLIEGDLNPDNSDVDKLFIQLVQTYNQLFEENPINASGVDAK |
| | AILSARLSKSRRLENLIAQLPGEKKNGLFGNLIALSLGLTPNFKSN |
| | FDLAEDAKLQLSKDTYDDDLDNLLAQIGDQYADLFLAAKNLSDAI |
| | LLSDILRVNTEITKAPLSASMIKRYDEHHQDLTLLKALVRQQLPE |
| | KYKEIFFDQSKNGYAGYIDGGASQEEFYKFIKPILEKMDGTEELL |
| | VKLNREDLLRKQRTFDNGSIPHQIHLGELHAILRRQEDFYPFLKD |
| | NREKIEKILTFRIPYYVGPLARGNSRFAWMTRKSEETITPWNFEEV |
| | VDKGASAQSFIERMTNFDKNLPNEKVLPKHSLLYEYFTVYNELTK |
| | VKYVTEGMRKPAFLSGEQKKAIVDLLFKTNRKVTVKQLKEDYFK |
| | KIECFDSVEISGVEDRFNASLGTYHDLLKIIKDKDFLDNEENEDILE |
| | DIVLTLTLFEDREMIEERLKTYAHLFDDKVMKQLKRRRYTGWGR |
| | LSRKLINGIRDKQSGKTILDFLKSDGFANRNFMQLIHDDSLTFKED |
| | IQKAQVSGQGDSLHEHIANLAGSPAIKKGILQTVKVVDELVKVMG |
| | RHKPENIVIEMARENQTTQKGQKNSRERMKRIEEGIKELGSQILK |
| | EHPVENTQLQNEKLYLYYLQNGRDMYVDQELDINRLSDYDVDAI |
| | VPQSFLKDDSIDNKVLTRSDKNRGKSDNVPSEEVVKKMKNYWRQ |
| | LLNAKLITQRKFDNLTKAERGGLSELDKAGFIKRQLVETRQITKH |
| | VAQILDSRMNTKYDENDKLIREVKVITLKSKLVSDFRKDFQFYKV |
| | REINNYHHAHDAYLNAVVGTALIKKYPKLESEFVYGDYKVYDVR |
| | KMIAKSEQEIGKATAKYFFYSNIMNFFKTEITLANGEIRKRPLIET |
| | NGETGEIVWDKGRDFATVRKVLSMPQVNIVKKTEVQTGGFSKES |
| | ILPKRNSDKLIARKKDWDPKKYGGFDSPTVAYSVLVVAKVEKGK |
| | SKKLKSVKELLGITIMERSSFEKNPIDFLEAKGYKEVKKDLIIKLP |
| | KYSLFELENGRKRMLASAGELQKGNELALPSKYVNFLYLASHYE |
| | KLKGSPEDNEQKQLFVEQHKHYLDEIIEQISEFSKRVILADANLDK |
| | VLSAYNKHRDKPIREQAENIIHLFTLTNLGAPAAFKYFDTTIDRKR |
| | YTSTKEVLDATLIHQSITGLYETRIDLSQLGGDSGGSSGGSSGSETP |
| | GTSESATPESSGGSSGGSSTLNIEDEYRLHETSKEPDVSLGSTWLSDFPQ |
| | AWAETGGMGLAVRQAPLIIPLKATSTPVSIKQYPMSQEARLGIKPHIQRLL |
| | DQGILVPCQSPWNTPLLPVKKPGTNDYRPVQDLREVNKRVEDIHPTVPNP |
| | YNLLSGLPPSHQWYTVLDLKDAFFCLRLHPTSQPLFAFEWRDPEMGISGQ |
| | LTWTRLPQGFKNSPTLFNEALHRDLADFRIQHPDLILLQYVDDLLLAATSE |
| | LDCQQGTRALLQTLGNLGYRASAKKAQICQKQVKYLGYLLKEGQRWLTE |
| | ARKETVMGQPTPKTPRQLREFLGKAGFCRLFIPGFAEMAAPLYPLTKPGT |
| | LFNWGPDQQKAYQEIKQALLTAPALGLPDLTKPFELFVDEKQGYAKGVL |
| | TQKLGPWRRPVAYLSKKLDPVAAGWPPCLRMVAAIAVLTKDAGKLTMGQ |
| | PLVILAPHAVEALVKQPPDRWLSNARMTHYQALLLDTDRVQFGPWALNP |
| | ATLLPLPEEGLQHNCLDNSRLINSGGSKRTADGSEFEPKKKRKV (SEO |
| | ID NO: 765) |
| | KEY: |
| | NUCLEAR LOCALIZATION SEQUENCE (NLS) TOP:(SEQ ID NO: 124), |
| | BOTTOM: (SEQ ID NO: 133) |
| | CAS9(H840A) (SEQ ID NO: 157) |
| | 33-AMINO ACID LINKER 1 (SEQ ID NO: 127) |
| | M-MLV TRUNCATED REVERSE TRANSCRIPTASE (SEQ ID NO: 766) |

[0645] See FIG. 75, which provides a bar graph comparing the efficiency (i.e., “% of total sequencing reads with the specified eidt or indels”) of PE2, PE2-trunc, PE3, and PE3-trunc over different target sites in various cell lines. The data shows that the prime editors comprising the truncated RT variants were about as efficient as the prime editors comprising the non-trunctated RT proteins.

[0646] In various embodiments, the multi-flap prime editor fusion proteins contemplated herein may also include any variants of the above-disclosed sequences having an amino acid sequence that is at least about 70% identical, at least about 80% identical, at least about 90% identical, at least about 95% identical, at least about 96% identical, at least about 97% identical, at least about 98% identical, at least about 99% identical, at least about 99.5% identical, or at least about 99.9% identical to PE1, PE2, or any of the above indicated prime editor fusion sequences.

[0647] In certain embodiments, linkers may be used to link any of the peptides or peptide domains or moieties of the invention (e.g., a napDNAbp linked or fused to a reverse transcriptase).

[5] Linkers and other domains

[0648] The PE fusion proteins may comprise various other domains besides the napDNAbp (e.g., Cas9 domain) and the polymerase domain (e.g., RT domain) For example, in the case where the napDNAbp is a Cas9 and the polymerase is a RT, the PE fusion proteins may comprise one or more linkers that join the Cas9 domain with the RT domain The linkers may also join other functional domains, such as nuclear localization sequences (NLS) or a FEN1 (or other flap endonuclease) to the PE fusion proteins or a domain thereof.

[0649] In addition, in embodiments involving trans prime editing, linkers may be used to link tPERT recruitment protein to a prime editor, e.g., between the tPERt recruitment protein and the napDNAbp. See e.g., FIG. 3G for an exemplary schematic of a trans prime editor (tPE) that includes linkers to separately fuse a polymerase domain and a recruiting protein domain to a napDNAbp.

[0650] A. Linkers

[0651] As defined above, the term “linker,” as used herein, refers to a chemical group or a molecule linking two molecules or moieties, e.g., a binding domain and a cleavage domain of a nuclease. In some embodiments, a linker joins a gRNA binding domain of an RNA-programmable nuclease and the catalytic domain of a polymerase (e.g., a reverse transcriptase). In some embodiments, a linker joins a dCas9 and reverse transcriptase. Typically, the linker is positioned between, or flanked by, two groups, molecules, or other moieties and connected to each one via a covalent bond, thus connecting the two. In some embodiments, the linker is an amino acid or a plurality of amino acids (e.g., a peptide or protein). In some embodiments, the linker is an organic molecule, group, polymer, or chemical moiety. In some embodiments, the linker is 5-100 amino acids in length, for example, 5, 6, 7, 8, 9, 10, 11, 12, 13, 14, 15, 16, 17, 18, 19, 20, 21, 22, 23, 24, 25, 26, 27, 28, 29, 30, 30-35, 35-40, 40-45, 45-50, 50-60, 60-70, 70-80, 80-90, 90-100, 100-150, or 150-200 amino acids in length. Longer or shorter linkers are also contemplated.

[0652] The linker may be as simple as a covalent bond, or it may be a polymeric linker many atoms in length. In certain embodiments, the linker is a polpeptide or based on amino acids. In other embodiments, the linker is not peptide-like. In certain embodiments, the linker is a covalent bond (e.g., a carbon-carbon bond, disulfide bond, carbon-heteroatom bond, etc.). In certain embodiments, the linker is a carbon-nitrogen bond of an amide linkage. In certain embodiments, the linker is a cyclic or acyclic, substituted or unsubstituted, branched or unbranched aliphatic or heteroaliphatic linker. In certain embodiments, the linker is polymeric (e.g., polyethylene, polyethylene glycol, polyamide, polyester, etc.). In certain embodiments, the linker comprises a monomer, dimer, or polymer of aminoalkanoic acid. In certain embodiments, the linker comprises an aminoalkanoic acid (e.g., glycine, ethanoic acid, alanine, beta-alanine, 3-aminopropanoic acid, 4-aminobutanoic acid, 5-pentanoic acid, etc.). In certain embodiments, the linker comprises a monomer, dimer, or polymer of aminohexanoic acid (Ahx). In certain embodiments, the linker is based on a carbocyclic moiety (e.g., cyclopentane, cyclohexane). In other embodiments, the linker comprises a polyethylene glycol moiety (PEG). In other embodiments, the linker comprises amino acids. In certain embodiments, the linker comprises a peptide. In certain embodiments, the linker comprises an aryl or heteroaryl moiety. In certain embodiments, the linker is based on a phenyl ring. The linker may included funtionalized moieties to facilitate attachment of a nucleophile (e.g., thiol, amino) from the peptide to the linker. Any electrophile may be used as part of the linker. Exemplary electrophiles include, but are not limited to, activated esters, activated amides, Michael acceptors, alkyl halides, aryl halides, acyl halides, and isothiocyanates.

[0653] In some other embodiments, the linker comprises the amino acid sequence (GGGGS)ₙ (SEQ ID NO: 165), (G)ₙ (SEQ ID NO: 166), (EAAAK)ₙ (SEQ ID NO: 167), (GGS)ₙ (SEQ ID NO: 168), (SGGS))ₙ (SEQ ID NO: 169), (XP)ₙ (SEQ ID NO: 170), or any combination thereof, wherein n is independently an integer between 1 and 30, and wherein X is any amino acid. In some embodiments, the linker comprises the amino acid sequence (GGS)N (SEQ ID NO: 176), wherein n is 1, 3, or 7. In some embodiments, the linker comprises the amino acid sequence SGSETPGTSESATPES (SEQ ID NO: 171). In some embodiments, the linker comprises the amino acid sequence SGGSSGGSSGSETPGTSESATPESSGGSSGGS (SEQ ID NO: 172). In some embodiments, the linker comprises the amino acid sequence SGGSGGSGGS (SEQ ID NO: 173). In some embodiments, the linker comprises the amino acid sequence SGGS (SEQ ID NO: 174). In other embodiments, the linker comprises the amino acid sequence SGGSSGGSSGSETPGTSESATPESAGSYPYDVPDYAGSAAPAAKKKKLDGSGSGGSSGGS (SEQ ID NO: 175, 60AA).

[0654] In certain embodiments, linkers may be used to link any of the peptides or peptide domains or moieties of the invention (e.g., a napDNAbp linked or fused to a reverse transcriptase).

[0655] As defined above, the term “linker,” as used herein, refers to a chemical group or a molecule linking two molecules or moieties, e.g., a binding domain and a cleavage domain of a nuclease. In some embodiments, a linker joins a gRNA binding domain of an RNA-programmable nuclease and the catalytic domain of a recombinase. In some embodiments, a linker joins a dCas9 and reverse transcriptase. Typically, the linker is positioned between, or flanked by, two groups, molecules, or other moieties and connected to each one via a covalent bond, thus connecting the two. In some embodiments, the linker is an amino acid or a plurality of amino acids (e.g., a peptide or protein). In some embodiments, the linker is an organic molecule, group, polymer, or chemical moiety. In some embodiments, the linker is 5-100 amino acids in length, for example, 5, 6, 7, 8, 9, 10, 11, 12, 13, 14, 15, 16, 17, 18, 19, 20, 21, 22, 23, 24, 25, 26, 27, 28, 29, 30, 30-35, 35-40, 40-45, 45-50, 50-60, 60-70, 70-80, 80-90, 90-100, 100-150, or 150-200 amino acids in length. Longer or shorter linkers are also contemplated.

[0656] The linker may be as simple as a covalent bond, or it may be a polymeric linker many atoms in length. In certain embodiments, the linker is a polypeptide or based on amino acids. In other embodiments, the linker is not peptide-like. In certain embodiments, the linker is a covalent bond (e.g., a carbon-carbon bond, disulfide bond, carbon-heteroatom bond, etc.). In certain embodiments, the linker is a carbon-nitrogen bond of an amide linkage. In certain embodiments, the linker is a cyclic or acyclic, substituted or unsubstituted, branched or unbranched aliphatic or heteroaliphatic linker. In certain embodiments, the linker is polymeric (e.g., polyethylene, polyethylene glycol, polyamide, polyester, etc.). In certain embodiments, the linker comprises a monomer, dimer, or polymer of aminoalkanoic acid. In certain embodiments, the linker comprises an aminoalkanoic acid (e.g., glycine, ethanoic acid, alanine, beta-alanine, 3-aminopropanoic acid, 4-aminobutanoic acid, 5-pentanoic acid, etc.). In certain embodiments, the linker comprises a monomer, dimer, or polymer of aminoHEXAnoic acid (Ahx). In certain embodiments, the linker is based on a carbocyclic moiety (e.g., cyclopentane, cycloHEXAne). In other embodiments, the linker comprises a polyethylene glycol moiety (PEG). In other embodiments, the linker comprises amino acids. In certain embodiments, the linker comprises a peptide. In certain embodiments, the linker comprises an aryl or heteroaryl moiety. In certain embodiments, the linker is based on a phenyl ring. The linker may included funtionalized moieties to facilitate attachment of a nucleophile (e.g., thiol, amino) from the peptide to the linker. Any electrophile may be used as part of the linker. Exemplary electrophiles include, but are not limited to, activated esters, activated amides, Michael acceptors, alkyl halides, aryl halides, acyl halides, and isothiocyanates.

[0657] In some other embodiments, the linker comprises the amino acid sequence (GGGGS)n (SEQ ID NO: 165), (G)n (SEQ ID NO: 166), (EAAAK)ₙ (SEQ ID NO: 167), (GGS)ₙ (SEQ ID NO: 168), (SGGS)n (SEQ ID NO: 169), (XP)n (SEQ ID NO: 170), or any combination thereof, wherein n is independently an integer between 1 and 30, and wherein X is any amino acid. In some embodiments, the linker comprises the amino acid sequence (GGS)N (SEQ ID NO: 176), wherein n is 1, 3, or 7. In some embodiments, the linker comprises the amino acid sequence SGSETPGTSESATPES (SEQ ID NO: 171). In some embodiments, the linker comprises the amino acid sequence SGGSSGGSSGSETPGTSESATPESSGGSSGGS (SEQ ID NO: 172). In some embodiments, the linker comprises the amino acid sequence SGGSGGSGGS (SEQ ID NO: 173). In some embodiments, the linker comprises the amino acid sequence SGGS (SEQ ID NO: 174).

[0658] In particular, the following linkers can be used in various embodiments to join prime editor domains with one another:

(SEQ ID NO: 767)
GGS;
(SEQ ID NO: 768)
GGSGGS;
(SEQ ID NO: 769)
GGSGGSGGS;
(SEQ ID NO: 127)
SGGSSGGSSGSETPGTSESATPESSGGSSGGSS;
(SEQ ID NO: 171)
SGSETPGTSESATPES;
(SEQ ID NO: 175)
SGGSSGGSSGSETPGTSESATPESAGSYPYDVPDYAGSAAPAAKKKKL
DGSGSGGSSGG S.

[0659] B. Nuclear localization sequence (NLS)

[0660] In various embodiments, the PE fusion proteins may comprise one or more nuclear localization sequences (NLS), which help promote translocation of a protein into the cell nucleus. Such sequences are well-known in the art and can include the following examples:

| DESCRIPTION | SEQUENCE | SEQ ID NO: |
|---|---|---|
| NLS OF | PKKKRKV | SEQ ID NO: 16 |
| SV40 | | |
| LARGE T- | | |
| AG | | |
| NLS | MKRTADGSEFESPKKKRKV | SEQ ID NO: 124 |
| NLS | MDSLLMNRRKFLYQFKNVRW | SEQ ID NO: 17 |
| | AKGRRETYLC | |
| NLS OF | AVKRPAATKKAGQAKKKKLD | SEQ ID NO: 190 |
| NUCLEOPL | | |
| ASMIN | | |
| NLS OF | MSRRRKANPTKLSENAKKLA | SEQ ID NO: 191 |
| EGL-13 | KEVEN | |
| NLS OF C- | PAAKRVKLD | SEQ ID NO: 192 |
| MYC | | |
| NLS OF | KLKIKRPVK | SEQ ID NO: 193 |
| TUS- | | |
| PROTEIN | | |
| NLS OF | VSRKRPRP | SEQ ID NO: 194 |
| POLYOMA | | |
| LARGE T- | | |
| AG | | |
| NLS OF | EGAPPAKRAR | SEQ ID NO: 195 |
| HEPATITIS | | |
| D VIRUS | | |
| ANTIGEN | | |
| NLS OF | PPQPKKKPLDGE | SEQ ID NO: 196 |
| MURINE | | |
| P53 | | |
| NLS OF PE1 | SGGSKRTADGSEFEPKKKRKV | SEQ ID NO: 133 |
| AND PE2 | | |

[0661] The NLS examples above are non-limiting. The PE fusion proteins may comprise any known NLS sequence, including any of those described in Cokol et al., “Finding nuclear localization signals,” EMBO Rep., 2000, 1(5): 411-415 and Freitas et al., “Mechanisms and Signals for the Nuclear Import of Proteins,” Current Genomics, 2009, 10(8): 550-7, each of which are incorporated herein by reference.

[0662] In various embodiments, the multi-flap prime editors and constructs encoding the prime editors disclosed herein further comprise one or more, preferably, at least two nuclear localization signals. In certain embodiments, the multi-flap prime editors comprise at least two NLSs. In embodiments with at least two NLSs, the NLSs can be the same NLSs or they can be different NLSs. In addition, the NLSs may be expressed as part of a fusion protein with the remaining portions of the multi-flap prime editors. In some embodiments, one or more of the NLSs are bipartite NLSs (“bpNLS”). In certain embodiments, the disclosed fusion proteins comprise two bipartite NLSs. In some embodiments, the disclosed fusion proteins comprise more than two bipartite NLSs.

[0663] The location of the NLS fusion can be at the N-terminus, the C-terminus, or within a sequence of a prime editor (e.g., inserted between the encoded napDNAbp component (e.g., Cas9) and a polymerase domain (e.g., a reverse transcriptase domain).

[0664] The NLSs may be any known NLS sequence in the art. The NLSs may also be any future-discovered NLSs for nuclear localization. The NLSs also may be any naturally-occurring NLS, or any non-naturally occurring NLS (e.g., an NLS with one or more desired mutations).

[0665] The term “nuclear localization sequence” or “NLS” refers to an amino acid sequence that promotes import of a protein into the cell nucleus, for example, by nuclear transport. Nuclear localization sequences are known in the art and would be apparent to the skilled artisan. For example, NLS sequences are described in Plank et al., International PCT application PCT/EP2000/011690, filed Nov. 23, 2000, published as WO/2001/038547 on May 31, 2001, the contents of which are incorporated herein by reference. In some embodiments, an NLS comprises the amino acid sequence PKKKRKV (SEQ ID NO: 16), MDSLLMNRRKFLYQFKNVRWAKGRRETYLC (SEQ ID NO: 17), KRTADGSEFESPKKKRKV (SEQ ID NO: 3864), or KRTADGSEFEPKKKRKV (SEQ ID NO: 125). In other embodiments, NLS comprises the amino acid sequences NLSKRPAAIKKAGQAKKKK (SEQ ID NO: 136), PAAKRVKLD (SEQ ID NO: 192), RQRRNELKRSF (SEQ ID NO: 3934), NQSSNFGPMKGGNFGGRSSGPYGGGGQYFAKPRNQGGY (SEQ ID NO: 3935).

[0666] In one aspect of the disclosure, a multi-flap prime editor may be modified with one or more nuclear localization signals (NLS), preferably at least two NLSs. In certain embodiments, the multi-flap prime editors are modified with two or more NLSs. The disclosure contemplates the use of any nuclear localization signal known in the art at the time of the disclosure, or any nuclear localization signal that is identified or otherwise made available in the state of the art after the time of the instant filing. A representative nuclear localization signal is a peptide sequence that directs the protein to the nucleus of the cell in which the sequence is expressed. A nuclear localization signal is predominantly basic, can be positioned almost anywhere in a protein's amino acid sequence, generally comprises a short sequence of four amino acids (Autieri & Agrawal, (1998) J. Biol. Chem. 273: 14731-37, incorporated herein by reference) to eight amino acids, and is typically rich in lysine and arginine residues (Magin et al., (2000) Virology 274: 11-16, incorporated herein by reference). Nuclear localization signals often comprise proline residues. A variety of nuclear localization signals have been identified and have been used to effect transport of biological molecules from the cytoplasm to the nucleus of a cell. See, e.g., Tinland et al., (1992) Proc. Natl. Acad. Sci. U.S.A. 89:7442-46; Moede et al., (1999) FEBS Lett. 461:229-34, which is incorporated by reference. Translocation is currently thought to involve nuclear pore proteins.

[0667] Most NLSs can be classified in three general groups: (i) a monopartite NLS exemplified by the SV40 large T antigen NLS (PKKKRKV (SEQ ID NO: 16)); (ii) a bipartite motif consisting of two basic domains separated by a variable number of spacer amino acids and exemplified by the Xenopus nucleoplasmin NLS (KRXXXXXXXXXXKKKL (SEQ ID NO: 3936))); and (iii) noncanonical sequences such as M9 of the hnRNP Al protein, the influenza virus nucleoprotein NLS, and the yeast Gal4 protein NLS (Dingwall and Laskey 1991).

[0668] Nuclear localization signals appear at various points in the amino acid sequences of proteins. NLS's have been identified at the N-terminus, the C-terminus, and in the central region of proteins. Thus, the disclosure provides multi-flap prime editors that may be modified with one or more NLSs at the C-terminus, the N-terminus, as well as at an internal region of the multi-flap prime editor. The residues of a longer sequence that do not function as component NLS residues should be selected so as not to interfere, for example tonically or sterically, with the nuclear localization signal itself. Therefore, although there are no strict limits on the composition of an NLS-comprising sequence, in practice, such a sequence can be functionally limited in length and composition.

[0669] The present disclosure contemplates any suitable means by which to modify a multi-flap prime editor to include one or more NLSs. In one aspect, the multi-flap prime editors may be engineered to express a prime editor protein that is translationally fused at its N-terminus or its C-terminus (or both) to one or more NLSs, i.e., to form a prime editor-NLS fusion construct. In other embodiments, the prime editor-encoding nucleotide sequence may be genetically modified to incorporate a reading frame that encodes one or more NLSs in an internal region of the encoded prime editor. In addition, the NLSs may include various amino acid linkers or spacer regions encoded between the prime editor and the N-terminally, C-terminally, or internally-attached NLS amino acid sequence, e.g, and in the central region of proteins. Thus, the present disclosure also provides for nucleotide constructs, vectors, and host cells for expressing fusion proteins that comprise a prime editor and one or more NLSs.

[0670] The multi-flap prime editors described herein may also comprise nuclear localization signals which are linked to a prime editor through one or more linkers, e.g., and polymeric, amino acid, nucleic acid, polysaccharide, chemical, or nucleic acid linker element. The linkers within the contemplated scope of the disclosure are not intented to have any limitations and can be any suitable type of molecule (e.g., polymer, amino acid, polysaccharide, nucleic acid, lipid, or any synthetic chemical linker domain) and be joined to the prime editor by any suitable strategy that effectuates forming a bond (e.g., covalent linkage, hydrogen bonding) between the prime editor and the one or more NLSs.

[0671] C. Flap Endonucleases (e.g., FEN1)

[0672] In various embodiments, the PE fusion proteins may comprise one or more flap endonulceases (e.g., FEN1), which refers to an enzyme that catalyzes the removal of 5′ single strand DNA flaps. These are naturally occurring enzymes that process the removal of 5′ flaps formed during cellular processes, including DNA replication. The multi-flap prime editing methods herein described may utilize endogenously supplied flap endonucleases or those provided in trans to remove the 5′ flap of endogenouse DNA formed at the target site during multi-flap prime editing. Flap endonucleases are known in the art and can be found described in Patel et al., “Flap endonucleases pass 5′-flaps through a flexible arch using a disorder-thread-order mechanism to confer specificity for free 5′-ends,” Nucleic Acids Research, 2012, 40(10): 4507-4519 and Tsutakawa et al., “Human flap endonuclease structures, DNA double-base flipping, and a unified understanding of the FEN1 superfamily,” Cell, 2011, 145(2): 198-211 (each of which are incorporated herein by reference). An exemplary flap endonuclease is FEN1, which can be represented by the following amino acid sequence:

| Description | Sequence | SEQ ID NO: |
|---|---|---|
| FEN1 | MGIQGLAKLIADVAPSAIRENDIKSYF | SEQ ID NO: |
| Wild type | GRKVAIDASMSIYQFLIAVRQGGDVLQ | 198 |
| (wt) | NEEGETTSHLMGMFYRTIRMMENGIKP | |
| | VYVFDGKPPQLKSGELAKRSERRAEAE | |
| | KQLQQAQAAGAEQEVEKFTKRLVKVTK | |
| | QHNDECKHLLSLMGIPYLDAPSEAEAS | |
| | CAALVKAGKVYAAATEDMDCLTFGSPV | |
| | LMRHLTASEAKKLPIQEFHLSRILQEL | |
| | GLNQEQFVDLCILLGSDYCESIRGIGP | |
| | KRAVDLIQKHKSIEEIVRRLDPNKYPV | |
| | PENWLHKEAHQLFLEPEVLDPESVELK | |
| | WSEPNEEELIKFMCGEKQFSEERIRSG | |
| | VKRLSKSRQGSTQGRLDDFFKVTGSLS | |
| | SAKRKEPEPKGSTKKKAKTGAAGKFKR | |
| | GK | |

[0673] The flap endonucleases may also include any FEN1 variant, mutant, or other flap endonuclease ortholog, homolog, or variant. Non-limiting FEN1 variant examples are as follows:

| Description | Sequence | SEQ ID NO: |
|---|---|---|
| FEN1 | MGIQGLAKLIADVAPSAIRENDIKSYFGRKVAIDASMSIYQF | SEQ ID NO: |
| K168R | LIAVRQGGDVLQNEEGETTSHLMGMFYRTIRMMENGIKPV | 199 |
| (relative to | YVFDGKPPQLKSGELAKRSERRAEAEKQLQQAQAAGAEQE | |
| FEN1 wt) | VEKFTKRLVKVTKQHNDECKHLLSLMGIPYLDAPSEAEASC | |
| | AALVRAGKVYAAATEDMDCLTFGSPVLMRHLTASEAKKLP | |
| | IQEFHLSRILQELGLNQEQFVDLCILLGSDYCESIRGIGPKRA | |
| | VDLIQKHKSIEEIVRRLDPNKYPVPENWLHKEAHQLFLEPEV | |
| | LDPESVELKWSEPNEEELIKFMCGEKQFSEERIRSGVKRLSK | |
| | SRQGSTQGRLDDFFKVTGSLSSAKRKEPEPKGSTKKKAKTG | |
| | AAGKFKRGK | |
| FEN1 | MGIQGLAKLIADVAPSAIRENDIKSYFGRKVAIDASMSIYQF | SEQ ID NO: |
| S187 A | LIAVRQGGDVLQNEEGETTSHLMGMFYRTIRMMENGIKPV | 200 |
| (relative to | YVFDGKPPQLKSGELAKRSERRAEAEKQLQQAQAAGAEQE | |
| FEN1 wt) | VEKFTKRLVKVTKQHNDECKHLLSLMGIPYLDAPSEAEASC | |
| | AALVKAGKVYAAATEDMDCLTFGAPVLMRHLTASEAKKL | |
| | PIQEFHLSRILQELGLNQEQFVDLCILLGSDYCESIRGIGPKRA | |
| | VDLIQKHKSIEEIVRRLDPNKYPVPENWLHKEAHQLFLEPEV | |
| | LDPESVELKWSEPNEEELIKFMCGEKQFSEERIRSGVKRLSK | |
| | SRQGSTQGRLDDFFKVTGSLSSAKRKEPEPKGSTKKKAKTG | |
| | AAGKFKRGK | |
| FEN1 | MGIQGLAKLIADVAPSAIRENDIKSYFGRKVAIDASMSIYQF | SEQ ID NO: |
| K354R | LIAVRQGGDVLQNEEGETTSHLMGMFYRTIRMMENGIKPV | 201 |
| (relative to | YVFDGKPPQLKSGELAKRSERRAEAEKQLQQAQAAGAEQE | |
| FEN1 wt) | VEKFTKRLVKVTKQHNDECKHLLSLMGIPYLDAPSEAEASC | |
| | AALVKAGKVYAAATEDMDCLTFGSPVLMRHLTASEAKKLP | |
| | IQEFHLSRILQELGLNQEQFVDLCILLGSDYCESIRGIGPKRA | |
| | VDLIQKHKSIEEIVRRLDPNKYPVPENWLHKEAHQLFLEPEV | |
| | LDPESVELKWSEPNEEELIKFMCGEKQFSEERIRSGVKRLSK | |
| | SRQGSTQGRLDDFFKVTGSLSSARRKEPEPKGSTKKKAKTG | |
| | AAGKFKRGK | |
| GEN1 | MGVNDLWQILEPVKQHIPLRNLGGKTIAVDLSLWVCEAQT | SEQ ID NO: |
| | VKKMMGSVMKPHLRNLFFRISYLTQMDVKLVFVMEGEPPK | 202 |
| | LKADVISKRNQSRYGSSGKSWSQKTGRSHFKSVLRECLHML | |
| | ECLGIPWVQAAGEAEAMCAYLNAGGHVDGCLTNDGDTFL | |
| | YGAQTVYRNFTMNTKDPHVDCYTMSSIKSKLGLDRDALVG | |
| | LAILLGCDYLPKGVPGVGKEQALKLIQILKGQSLLQRFNRW | |
| | NETSCNSSPQLLVTKKLAHCSVCSHPGSPKDHERNGCRLCK | |
| | SDKYCEPHDYEYCCPCEWHRTEHDRQLSEVENNIKKKACC | |
| | CEGFPFHEVIQEFLLNKDKLVKVIRYQRPDLLLFQRFTLEKM | |
| | EWPNHYACEKLLVLLTHYDMIERKLGSRNSNQLQPIRIVKT | |
| | RIRNGVHCFEIEWEKPEHYAMEDKQHGEFALLTIEEESLFEA | |
| | AYPEIVAVYQKQKLEIKGKKQKRIKPKENNLPEPDEVMSFQ | |
| | SHMTLKPTCEIFHKQNSKLNSGISPDPTLPQESISASLNSLLLP | |
| | KNTPCLNAQEQFMSSLRPLAIQQIKAVSKSLISESSQPNTSSH | |
| | NISVIADLHLSTIDWEGTSFSNSPAIQRNTFSHDLKSEVESELS | |
| | AIPDGFEN1PEQLSCESERYTANIKKVLDEDSDGISPEEHLLS | |
| | GITDLCLQDLPLKERIFTKLSYPQDNLQPDVNLKTLSILSVKE | |
| | SCIANSGSDCTSHLSKDLPGIPLQNESRDSKILKGDQLLQEDY | |
| | KVNTSVPYSVSNTVVKTCNVRPPNTALDHSRKVDMQTTRKI | |
| | LMKKSVCLDRHSSDEQSAPVFGKAKYTTQRMKHSSQKHNS | |
| | SHFKESGHNKLSSPKIHIKETEQCVRSYETAENEESCFPDSTK | |
| | SSLSSLQCHKKENNSGTCLDSPLPLRQRLKLRFQST | |
| ERCC5 | MGVQGLWKLLECSGRQVSPEALEGKILAVDISIWLNQALKG | SEQ ID NO: |
| | VRDRHGNSIENPHLLTLFHRLCKLLFFRIRPIFVFDGDAPLLK | 203 |
| | KQTLVKRRQRKDLASSDSRKTTEKLLKTFLKRQAIKTAFRS | |
| | KRDEALPSLTQVRRENDLYVLPPLQEEEKHSSEEEDEKEWQ | |
| | ERMNQKQALQEEFFHNPQAIDIESEDFSSLPPEVKHEILTDM | |
| | KEFTKRRRTLFEAMPEESDDFSQYQLKGLLKKNYLNQHIEH | |
| | VQKEMNQQHSGHIRRQYEDEGGFLKEVESRRVVSEDTSHYI | |
| | LIKGIQAKTVAEVDSESLPSSSKMHGMSFDVKSSPCEKLKTE | |
| | KEPDATPPSPRTLLAMQAALLGSSSEEELESENRRQARGRN | |
| | APAAVDEGSISPRTLSAIKRALDDDEDVKVCAGDDVQTGGP | |
| | GAEEMRINSSTENSDEGLKVRDGKGIPFTATLASSSVNSAEE | |
| | HVASTNEGREPTDSVPKEQMSLVHVGTEAFPISDESMIKDR | |
| | KDRLPLESAVVRHSDAPGLPNGRELTPASPTCTNSVSKNETH | |
| | AEVLEQQNELCPYESKFDSSLLSSDDETKCKPNSASEVIGPV | |
| | SLQETSSIVSVPSEAVDNVENVVSFNAKEHENFLETIQEQQT | |
| | TESAGQDLISIPKAVEPMEIDSEESESDGSFIEVQSVISDEELQ | |
| | AEFPETSKPPSEQGEEELVGTREGEAPAESESLLRDNSERDD | |
| | VDGEPQEAEKDAEDSLHEWQDINLEELETLESNLLAQQNSL | |
| | KAQKQQQERIAATVTGQMFLESQELLRLFGIPYIQAPMEAE | |
| | AQCAILDLTDQTSGTITDDSDIWLFGARHVYRNFFNKNKFV | |
| | EYYQYVDFHNQLGLDRNKLINLAYLLGSDYTEGIPTVGCVT | |
| | AMEILNEFPGHGLEPLLKFSEWWHEAQKNPKIRPNPHDTKV | |
| | KKKLRTLQLTPGFPNPAVAEAYLKPVVDDSKGSFLWGKPD | |
| | LDKIREFCQRYFGWNRTKTDESLFPVLKQLDAQQTQLRIDSF | |
| | FRLAQQEKEDAKRIKSQRLNRAVTCMLRKEKEAAASEIEAV | |
| | SVAMEKEFELLDKAKRKTQKRGITNTLEESSSLKRKRLSDS | |
| | KRKNTCGGFLGETCLSESSDGSSSEDAESSSLMNVQRRTAA | |
| | KEPKTSASDSQNSVKEAPVKNGGATTSSSSDSDDDGGKEK | |
| | MVLVTARSVFGKKRRKLRRARGRKRKT | |

[0674] In various embodiments, the multi-flap prime editor fusion proteins contemplated herein may include any flap endonulcease variant of the above-disclosed sequences having an amino acid sequence that is at least about 70% identical, at least about 80% identical, at least about 90% identical, at least about 95% identical, at least about 96% identical, at least about 97% identical, at least about 98% identical, at least about 99% identical, at least about 99.5% identical, or at least about 99.9% identical to any of the above sequences.

[0675] Other endonucleases that may be utilized by the instant methods to facilitate removal of the 5′ end single strand DNA flap include, but are not limited to (1) trex 2, (2) exol endonuclease (e.g., Keijzers et al., Biosci Rep. 2015, 35(3): e00206)

### Trex 2

[0676] 3′ three prime repair exonuclease 2 (TREX2)—human

Accession No. NM_080701
(SEQ ID NO: 3865)
MSEAPRAETFVFLDLEATGLPSVEPEIAELSLFAVHRSSLENPEHDESG
ALVLPRVLDKLTLCMCPERPFTAKASEITGLSSEGLARCRKAGFDGAVV
RTLQAFLSRQAGPICLVAHNGFDYDFPLLCAELRRLGARLPRDTVCLDT
LPALRGLDRAHSHGTRARGRQGYSLGSLFHRYFRAEPSAAHSAEGDVHT
LLLIFLHRAAELLAWADEQARGWAHIEPMYLPPDDPSLEA.

[0677] 3′ three prime repair exonuclease 2 (TREX2)—mouse

Accession No. NM_011907
(SEQ ID NO: 3866)
MSEPPRAETFVFLDLEATGLPNMDPEIAEISLFAVHRSSLENPERDDSG
SLVLPRVLDKLTLCMCPERPFTAKASEITGLSSESLMHCGKAGFNGAVV
RTLQGFLSRQEGPICLVAHNGFDYDFPLLCTELQRLGAHLPQDTVCLDT
LPALRGLDRAHSHGTRAQGRKSYSLASLFHRYFQAEPSAAHSAEGDVHT
LLLIFLHRAPELLAWADEQARSWAHIEPMYVPPDGPSLEA.

[0678] 3′ three prime repair exonuclease 2 (TREX2)—rat

Accession No. NM_001107580
(SEQ ID NO: 3867)
MSEPLRAETFVFLDLEATGLPNMDPEIAEISLFAVHRSSLENPERDDSG
SLVLPRVLDKLTLCMCPERPFTAKASEITGLSSEGLMNCRKAAFNDAVV
RTLQGFLSRQEGPICLVAHNGFDYDFPLLCTELQRLGAHLPRDTVCLDT
LPALRGLDRVHSHGTRAQGRKSYSLASLFHRYFQAEPSAAHSAEGDVNT
LLLIFLHRAPELLAWADEQARSWAHIEPMYVPPDGPSLEA.

### ExoI

[0679] Human exonuclease 1 (EXO1) has been implicated in many different DNA metabolic processes, including DNA mismatch repair (MMR), micro-mediated end-joining, homologous recombination (HR), and replication. Human EXO1 belongs to a family of eukaryotic nucleases, Rad2/XPG, which also include FEN1 and GEN1. The Rad2/XPG family is conserved in the nuclease domain through species from phage to human. The EXO1 gene product exhibits both 5′ exonuclease and 5′ flap activity. Additionally, EXO1 contains an intrinsic 5′ RNase H activity. Human EXO1 has a high affinity for processing double stranded DNA (dsDNA), nicks, gaps, pseudo Y structures and can resolve Holliday junctions using its inherit flap activity. Human EXO1 is implicated in MMR and contain conserved binding domains interacting directly with MLH1 and MSH2. EXO1 nucleolytic activity is positively stimulated by PCNA, MutSa (MSH2/MSH6 complex), 14-3-3, MRN and 9-1-1 complex.

[0680] exonuclease 1 (EXO1) Accession No. NM_003686 (Homo sapiens exonuclease 1 (EXO1), transcript variant 3)—isoform A

(SEQ ID NO: 3868)
MGIQGLLQFIKEASEPIHVRKYKGQVVAVDTYCWLHKGAIACAEKLAKG
EPTDRYVGFCMKFVNMLLSHGIKPILVFDGCTLPSKKEVERSRRERRQA
NLLKGKQLLREGKVSEARECFTRSINITHAMAHKVIKAARSQGVDCLVA
PYEADAQLAYLNKAGIVQAIITEDSDLLAFGCKKVILKMDQFGNGLEID
QARLGMCRQLGDVFTEEKFRYMCILSGCDYLSSLRGIGLAKACKVLRLA
NNPDIVKVIKKIGHYLKMNITVPEDYINGFIRANNTFLYQLVFDPIKRK
LIPLNAYEDDVDPETLSYAGQYVDDSIALQIALGNKDINTFEQIDDYNP
DTAMPAHSRSHSWDDKTCQKSANVSSIWHRNYSPRPESGTVSDAPQLKE
NPSTVGVERVISTKGLNLPRKSSIVKRPRSAELSEDDLLSQYSLSFTKK
TKKNSSEGNKSLSFSEVFVPDLVNGPTNKKSVSTPPRTRNKFATFLQRK
NEESGAVVVPGTRSRFFCSSDSTDCVSNKVSIQPLDETAVTDKENNLHE
SEYGDQEGKRLVDTDVARNSSDDIPNNHIPGDHIPDKATVFTDEESYSF
ESSKFTRTISPPTLGTLRSCFSWSGGLGDFSRTPSPSPSTALQQFRRKS
DSPTSLPENNMSDVSQLKSEESSDDESHPLREEACSSQSQESGEFSLQS
SNASKLSQCSSKDSDSEESDCNIKLLDSQSDQTSKLRLSHFSKKDTPLR
NKVPGLYKSSSADSLSTTKIKPLGPARASGLSKKPASIQKRKHHNAENK
PGLQIKLNELWKNFGFKKF.

[0681] exonuclease 1 (EXO1) Accession No. NM_006027 (Homo sapiens exonuclease 1 (EXO1), transcript variant 3)—isoform B

(SEQ ID NO: 3869)
MGIQGLLQFIKEASEPIHVRKYKGQVVAVDTYCWLHKGAIACAEKLAKG
EPTDRYVGFCMKFVNMLLSHGIKPILVFDGCTLPSKKEVERSRRERRQA
NLLKGKQLLREGKVSEARECFTRSINITHAMAHKVIKAARSQGVDCLVA
PYEADAQLAYLNKAGIVQAIITEDSDLLAFGCKKVILKMDQFGNGLEID
QARLGMCRQLGDVFTEEKFRYMCILSGCDYLSSLRGIGLAKACKVLRLA
NNPDIVKVIKKIGHYLKMNITVPEDYINGFIRANNTFLYQLVFDPIKRK
LIPLNAYEDDVDPETLSYAGQYVDDSIALQIALGNKDINTFEQIDDYNP
DTAMPAHSRSHSWDDKTCQKSANVSSIWHRNYSPRPESGTVSDAPQLKE
NPSTVGVERVISTKGLNLPRKSSIVKRPRSAELSEDDLLSQYSLSFTKK
TKKNSSEGNKSLSFSEVFVPDLVNGPTNKKSVSTPPRTRNKFATFLQRK
NEESGAVVVPGTRSRFFCSSDSTDCVSNKVSIQPLDETAVTDKENNLHE
SEYGDQEGKRLVDTDVARNSSDDIPNNHIPGDHIPDKATVFTDEESYSF
ESSKFTRTISPPTLGTLRSCFSWSGGLGDFSRTPSPSPSTALQQFRRKS
DSPTSLPENNMSDVSQLKSEESSDDESHPLREEACSSQSQESGEFSLQS
SNASKLSQCSSKDSDSEESDCNIKLLDSQSDQTSKLRLSHFSKKDTPLR
NKVPGLYKSSSADSLSTTKIKPLGPARASGLSKKPASIQKRKHHNAENK
PGLQIKLNELWKNFGFKKDSEKLPPCKKPLSPVRDNIQLTPEAEEDIFN
KPECGRVQRAIFQ.

[0682] exonuclease 1 (EXO1) Accession No. NM_001319224 (Homo sapiens exonuclease 1 (EXO1), transcript variant 4)—isoform C

(SEQ ID NO: 3870)
MGIQGLLQFIKEASEPIHVRKYKGQVVAVDTYCWLHKGAIACAEKLAKG
EPTDRYVGFCMKFVNMLLSHGIKPILVFDGCTLPSKKEVERSRRERRQA
NLLKGKQLLREGKVSEARECFTRSINITHAMAHKVIKAARSQGVDCLVA
PYEADAQLAYLNKAGIVQAIITEDSDLLAFGCKKVILKMDQFGNGLEID
QARLGMCRQLGDVFTEEKFRYMCILSGCDYLSSLRGIGLAKACKVLRLA
NNPDIVKVIKKIGHYLKMNITVPEDYINGFIRANNTFLYQLVFDPIKRK
LIPLNAYEDDVDPETLSYAGQYVDDSIALQIALGNKDINTFEQIDDYNP
DTAMPAHSRSHSWDDKTCQKSANVSSIWHRNYSPRPESGTVSDAPQLKE
NPSTVGVERVISTKGLNLPRKSSIVKRPRSELSEDDLLSQYSLSFTKKT
KKNSSEGNKSLSFSEVFVPDLVNGPTNKKSVSTPPRTRNKFATFLQRKN
EESGAVVVPGTRSRFFCSSDSTDCVSNKVSIQPLDETAVTDKENNLHES
EYGDQEGKRLVDTDVARNSSDDIPNNHIPGDHIPDKATVFTDEESYSFE
SSKFTRTISPPTLGTLRSCFSWSGGLGDFSRTPSPSPSTALQQFRRKSD
SPTSLPENNMSDVSQLKSEESSDDESHPLREEACSSQSQESGEFSLQSS
NASKLSQCSSKDSDSEESDCNIKLLDSQSDQTSKLRLSHFSKKDTPLRN
KVPGLYKSSSADSLSTTKIKPLGPARASGLSKKPASIQKRKHHNAENKP
GLQIKLNELWKNFGFKKDSEKLPPCKKPLSPVRDNIQLTPEAEEDIFNK
PECGRVQRAIFQ.

[0683] D. Inteins and Split-Inteins

[0684] It will be understood that in some embodiments (e.g., delivery of a multi-flap prime editor in vivo using AAV particles), it may be advantageous to split a polypeptide (e.g., a deaminase or a napDNAbp) or a fusion protein (e.g., a multi-flap prime editor) into an N-terminal half and a C-terminal half, delivery them separately, and then allow their colocalization to reform the complete protein (or fusion protein as the case may be) within the cell. Separate halves of a protein or a fusion protein may each comprise a split-intein tag to facilitate the reformation of the complete protein or fusion protein by the mechanism of protein trans splicing.

[0685] Protein trans-splicing, catalyzed by split inteins, provides an entirely enzymatic method for protein ligation. A split-intein is essentially a contiguous intein (e g a mini-intein) split into two pieces named N-intein and C-intein, respectively. The N-intein and C-intein of a split intein can associate non-covalently to form an active intein and catalyze the splicing reaction essentially in same way as a contiguous intein does. Split inteins have been found in nature and also engineered in laboratories. As used herein, the term “split intein” refers to any intein in which one or more peptide bond breaks exists between the N-terminal and C-terminal amino acid sequences such that the N-terminal and C-terminal sequences become separate molecules that can non-covalently reassociate, or reconstitute, into an intein that is functional for trans-splicing reactions. Any catalytically active intein, or fragment thereof, may be used to derive a split intein for use in the methods of the invention. For example, in one aspect the split intein may be derived from a eukaryotic intein. In another aspect, the split intein may be derived from a bacterial intein. In another aspect, the split intein may be derived from an archaeal intein. Preferably, the split intein so-derived will possess only the amino acid sequences essential for catalyzing trans-splicing reactions.

[0686] As used herein, the “N-terminal split intein (In)” refers to any intein sequence that comprises an N-terminal amino acid sequence that is functional for trans-splicing reactions. An In thus also comprises a sequence that is spliced out when trans-splicing occurs. An In can comprise a sequence that is a modification of the N-terminal portion of a naturally occurring intein sequence. For example, an In can comprise additional amino acid residues and/or mutated residues so long as the inclusion of such additional and/or mutated residues does not render the In non-functional in trans-splicing. Preferably, the inclusion of the additional and/or mutated residues improves or enhances the trans-splicing activity of the In.

[0687] As used herein, the “C-terminal split intein (k)” refers to any intein sequence that comprises a C-terminal amino acid sequence that is functional for trans-splicing reactions. In one aspect, the Ic comprises 4 to 7 contiguous amino acid residues, at least 4 amino acids of which are from the last β-strand of the intein from which it was derived. An Ic thus also comprises a sequence that is spliced out when trans-splicing occurs. An Ic can comprise a sequence that is a modification of the C-terminal portion of a naturally occurring intein sequence. For example, an Ic can comprise additional amino acid residues and/or mutated residues so long as the inclusion of such additional and/or mutated residues does not render the In non-functional in trans-splicing. Preferably, the inclusion of the additional and/or mutated residues improves or enhances the trans-splicing activity of the Ic.

[0688] In some embodiments of the invention, a peptide linked to an Ic or an In can comprise an additional chemical moiety including, among others, fluorescence groups, biotin, polyethylene glycol (PEG), amino acid analogs, unnatural amino acids, phosphate groups, glycosyl groups, radioisotope labels, and pharmaceutical molecules. In other embodiments, a peptide linked to an Ic can comprise one or more chemically reactive groups including, among others, ketone, aldehyde, Cys residues and Lys residues. The N-intein and C-intein of a split intein can associate non-covalently to form an active intein and catalyze the splicing reaction when an “intein-splicing polypeptide (ISP)” is present. As used herein, “intein-splicing polypeptide (ISP)” refers to the portion of the amino acid sequence of a split intein that remains when the Ic, In, or both, are removed from the split intein. In certain embodiments, the In comprises the ISP. In another embodiment, the Ic comprises the ISP. In yet another embodiment, the ISP is a separate peptide that is not covalently linked to In nor to Ic.

[0689] Split inteins may be created from contiguous inteins by engineering one or more split sites in the unstructured loop or intervening amino acid sequence between the −12 conserved beta-strands found in the structure of mini-inteins. Some flexibility in the position of the split site within regions between the beta-strands may exist, provided that creation of the split will not disrupt the structure of the intein, the structured beta-strands in particular, to a sufficient degree that protein splicing activity is lost.

[0690] In protein trans-splicing, one precursor protein consists of an N-extein part followed by the N-intein, another precursor protein consists of the C-intein followed by a C-extein part, and a trans-splicing reaction (catalyzed by the N- and C-inteins together) excises the two intein sequences and links the two extein sequences with a peptide bond. Protein trans-splicing, being an enzymatic reaction, can work with very low (e.g. micromolar) concentrations of proteins and can be carried out under physiological conditions.

[0691] Exemplary sequences are as follows:

| NAME | SEQUENCE OF LIGAND-DEPENDENT INTEIN |
|---|---|
| 2-4 INTEIN: | CLAEGTRIFDPVTGTTHRIEDVVDGRKPIHVVAAAKDGTLLARPVVSWFD |
| | QGTRDVIGLRIAGGAIVWATPDHKVLTEYGWRAAGELRKGDRVAGPGGS |
| | GNSLALSLTADQMVSALLDAEPPILYSEYDPTSPFSEASMMGLLTNLADRE |
| | LVHMINWAKRVPGFVDLTLHDQAHLLECAWLEILMIGLVWRSMEHPGKL |
| | LFAPNLLLDRNQGKCVEGMVEIFDMLLATSSRFRMMNLQGEEFVCLKSII |
| | LLNSGVYTFLSSTLKSLEEKDHIHRALDKITDTLIHLMAKAGLTLQQQHQR |
| | LAQLLLILSHIRHMSNKGMEHLYSMKYKNVVPLYDLLLEMLDAHRLHAG |
| | GSGASRVQAFADALDDKFLHDMLAEELRYSVIREVLPTRRARTFDLEVEE |
| | LHTLVAEGVVVHNC (SEQ ID NO: 8) |
| 3-2 INTEIN | CLAEGTRIFDPVTGTTHRIEDVVDGRKPIHVVAVAKDGTLLARPVVSWFD |
| | QGTRDVIGLRIAGGAIVWATPDHKVLTEYGWRAAGELRKGDRVAGPGGS |
| | GNSLALSLTADQMVSALLDAEPPILYSEYDPTSPFSEASMMGLLTNLADRE |
| | LVHMINWAKRVPGFVDLTLHDQAHLLECAWLEILMIGLVWRSMEHPGKL |
| | LFAPNLLLDRNQGKCVEGMVEIFDMLLATSSRFRMMNLQGEEFVCLKSII |
| | LLNSGVYTFLSSTLKSLEEKDHIHRALDKITDTLIHLMAKAGLTLQQQHQR |
| | LAQLLLILSHIRHMSNKGMEHLYSMKYTNVVPLYDLLLEMLDAHRLHAG |
| | GSGASRVQAFADALDDKFLHDMLAEELRYSVIREVLPTRRARTFDLEVEE |
| | LHTLVAEGVVVHNC (SEQ ID NO: 9) |
| 30R3-1 INTEIN | CLAEGTRIFDPVTGTTHRIEDVVDGRKPIHVVAAAKDGTLLARPVVSWFD |
| | QGTRDVIGLRIAGGATVWATPDHKVLTEYGWRAAGELRKGDRVAGPGGS |
| | GNSLALSLTADQMVSALLDAEPPIPYSEYDPTSPFSEASMMGLLTNLADRE |
| | LVHMINWAKRVPGFVDLTLHDQAHLLECAWLEILMIGLVWRSMEHPGKL |
| | LFAPNLLLDRNQGKCVEGMVEIFDMLLATSSRFRMMNLQGEEFVCLKSII |
| | LLNSGVYTFLSSTLKSLEEKDHIHRALDKITDTLIHLMAKAGLTLQQQHQR |
| | LAQLLLILSHIRHMSNKGMEHLYSMKYKNVVPLYDLLLEMLDAHRLHAG |
| | GSGASRVQAFADALDDKFLHDMLAEGLRYSVIREVLPTRRARTFDLEVEE |
| | LHTLVAEGVVVHNC (SEQ ID NO: 10) |
| 30R3-2 INTEIN | CLAEGTRIFDPVTGTTHRIEDVVDGRKPIHVVAAAKDGTLLARPVVSWFD |
| | QGTRDVIGLRIAGGATVWATPDHKVLTEYGWRAAGELRKGDRVAGPGGS |
| | GNSLALSLTADQMVSALLDAEPPILYSEYDPTSPFSEASMMGLLTNLADRE |
| | LVHMINWAKRVPGFVDLTLHDQAHLLECAWLEILMIGLVWRSMEHPGKL |
| | LFAPNLLLDRNQGKCVEGMVEIFDMLLATSSRFRMMNLQGEEFVCLKSII |
| | LLNSGVYTFLSSTLKSLEEKDHIHRALDKITDTLIHLMAKAGLTLQQQHQR |
| | LAQLLLILSHIRHMSNKGMEHLYSMKYKNVVPLYDLLLEMLDAHRLHAG |
| | GSGASRVQAFADALDDKFLHDMLAEELRYSVIREVLPTRRARTFDLEVEE |
| | LHTLVAEGVVVHNC (SEQ ID NO: 11) |
| 30R3-3 INTEIN | CLAEGTRIFDPVTGTTHRIEDVVDGRKPIHVVAAAKDGTLLARPVVSWFD |
| | QGTRDVIGLRIAGGATVWATPDHKVLTEYGWRAAGELRKGDRVAGPGGS |
| | GNSLALSLTADQMVSALLDAEPPIPYSEYDPTSPFSEASMMGLLTNLADRE |
| | LVHMINWAKRVPGFVDLTLHDQAHLLECAWLEILMIGLVWRSMEHPGKL |
| | LFAPNLLLDRNQGKCVEGMVEIFDMLLATSSRFRMMNLQGEEFVCLKSII |
| | LLNSGVYTFLSSTLKSLEEKDHIHRALDKITDTLIHLMAKAGLTLQQQHQR |
| | LAQLLLILSHIRHMSNKGMEHLYSMKYKNVVPLYDLLLEMLDAHRLHAG |
| | GSGASRVQAFADALDDKFLHDMLAEELRYSVIREVLPTRRARTFDLEVEE |
| | LHTLVAEGVVVHNC (SEQ ID NO: 12) |
| 37R3-1 INTEIN | CLAEGTRIFDPVTGTTHRIEDVVDGRKPIHVVAAAKDGTLLARPVVSWFD |
| | QGTRDVIGLRIAGGATVWATPDHKVLTEYGWRAAGELRKGDRVAGPGGS |
| | GNSLALSLTADQMVSALLDAEPPILYSEYNPTSPFSEASMMGLLTNLADRE |
| | LVHMINWAKRVPGFVDLTLHDQAHLLERAWLEILMIGLVWRSMEHPGKL |
| | LFAPNLLLDRNQGKCVEGMVEIFDMLLATSSRFRMMNLQGEEFVCLKSII |
| | LLNSGVYTFLSSTLKSLEEKDHIHRALDKITDTLIHLMAKAGLTLQQQHQR |
| | LAQLLLILSHIRHMSNKGMEHLYSMKYKNVVPLYDLLLEMLDAHRLHAG |
| | GSGASRVQAFADALDDKFLHDMLAEGLRYSVIREVLPTRRARTFDLEVEE |
| | LHTLVAEGVVVHNC ((SEQ ID NO: 13) |
| 37R3-2 INTEIN | CLAEGTRIFDPVTGTTHRIEDVVDGRKPIHVVAAAKDGTLLARPVVSWFD |
| | QGTRDVIGLRIAGGAIVWATPDHKVLTEYGWRAAGELRKGDRVAGPGGS |
| | GNSLALSLTADQMVSALLDAEPPILYSEYDPTSPFSEASMMGLLTNLADRE |
| | LVHMINWAKRVPGFVDLTLHDQAHLLERAWLEILMIGLVWRSMEHPGKL |
| | LFAPNLLLDRNQGKCVEGMVEIFDMLLATSSRFRMMNLQGEEFVCLKSII |
| | LLNSGVYTFLSSTLKSLEEKDHIHRALDKITDTLIHLMAKAGLTLQQQHQR |
| | LAQLLLILSHIRHMSNKGMEHLYSMKYKNVVPLYDLLLEMLDAHRLHAG |
| | GSGASRVQAFADALDDKFLHDMLAEGLRYSVIREVLPTRRARTFDLEVEE |
| | LHTLVAEGVVVHNC (SEQ ID NO: 14) |
| 37R3-3 INTEIN | CLAEGTRIFDPVTGTTHRIEDVVDGRKPIHVVAVAKDGTLLARPVVSWFD |
| | QGTRDVIGLRIAGGATVWATPDHKVLTEYGWRAAGELRKGDRVAGPGGS |
| | GNSLALSLTADQMVSALLDAEPPILYSEYDPTSPFSEASMMGLLTNLADRE |
| | LVHMINWAKRVPGFVDLTLHDQAHLLERAWLEILMIGLVWRSMEHPGKL |
| | LFAPNLLLDRNQGKCVEGMVEIFDMLLATSSRFRMMNLQGEEFVCLKSII |
| | LLNSGVYTFLSSTLKSLEEKDHIHRALDKITDTLIHLMAKAGLTLQQQHQR |
| | LAQLLLILSHIRHMSNKGMEHLYSMKYKNVVPLYDLLLEMLDAHRLHAG |
| | GSGASRVQAFADALDDKFLHDMLAEELRYSVIREVLPTRRARTFDLEVEE |
| | LHTLVAEGVVVHNC (SEQ ID NO: 15) |

[0692] Although inteins are most frequently found as a contiguous domain, some exist in a naturally split form. In this case, the two fragments are expressed as separate polypeptides and must associate before splicing takes place, so-called protein trans-splicing.

[0693] An exemplary split intein is the Ssp DnaE intein, which comprises two subunits, namely, DnaE-N and DnaE-C. The two different subunits are encoded by separate genes, namely dnaE-n and dnaE-c, which encode the DnaE-N and DnaE-C subunits, respectively. DnaE is a naturally occurring split intein in Synechocytis sp. PCC6803 and is capable of directing trans-splicing of two separate proteins, each comprising a fusion with either DnaE-N or DnaE-C.

[0694] Additional naturally occurring or engineered split-intein sequences are known in the or can be made from whole-intein sequences described herein or those available in the art. Examples of split-intein sequences can be found in Stevens et al., “A promiscuous split intein with expanded protein engineering applications,” PNAS, 2017, Vol.114: 8538-8543; Iwai et al., “Highly efficient protein trans-splicing by a naturally split DnaE intein from Nostc punctiforme, FEB S Lett, 580: 1853-1858, each of which are incorporated herein by reference. Additional split intein sequences can be found, for example, in WO 2013/045632, WO 2014/055782, WO 2016/069774, and EP2877490, the contents each of which are incorporated herein by reference.

[0695] In addition, protein splicing in trans has been described in vivo and in vitro (Shingledecker, et al., Gene 207:187 (1998), Southworth, et al., EMBO J. 17:918 (1998); Mills, et al., Proc. Natl. Acad. Sci. USA, 95:3543-3548 (1998); Lew, et al., J. Biol. Chem., 273:15887-15890 (1998); Wu, et al., Biochim. Biophys. Acta 35732:1 (1998b), Yamazaki, et al.,J. Am. Chem. Soc. 120:5591 (1998), Evans, et al., J. Biol. Chem. 275:9091 (2000); Otomo, et al., Biochemistry 38:16040-16044 (1999); Otomo, et al., J. Biolmol. NMR 14:105-114 (1999); Scott, et al., Proc. Natl. Acad. Sci. USA 96:13638-13643 (1999)) and provides the opportunity to express a protein as to two inactive fragments that subsequently undergo ligation to form a functional product, e.g., as shown in FIGS. 66 and 67 with regard to the formation of a complete PE fusion protein from two separately-expressed halves.

[0696] E. RNA-Protein Interaction Domain

[0697] In various embodiments, two separate protein domains (e.g., a Cas9 domain and a polymerase domain) may be colocalized to one another to form a functional complex (akin to the function of a fusion protein comprising the two separate protein domains) by using an “RNA-protein recruitment system,” such as the “MS2 tagging technique.” Such systems generally tag one protein domain with an “RNA-protein interaction domain” (aka “RNA-protein recruitment domain”) and the other with an “RNA-binding protein” that specifically recognizes and binds to the RNA-protein interaction domain, e.g., a specific hairpin structure. These types of systems can be leveraged to colocalize the domains of a multi-flap prime editor, as well as to recruitment additional functionalities to a multi-flap prime editor, such as a UGI domain. In one example, the MS2 tagging technique is based on the natural interaction of the MS2 bacteriophage coat protein (“MCP” or “MS2cp”) with a stem-loop or hairpin structure present in the genome of the phage, i.e., the “MS2 hairpin.” In the case of the MS2 hairpin, it is recognized and bound by the MS2 bacteriophage coat protein (MCP). Thus, in one exemplarly scenario a deaminase-MS2 fusion can recruit a Cas9-MCP fusion.

[0698] A review of other modular RNA-protein interaction domains are described in the art, for example, in Johansson et al., “RNA recognition by the MS2 phage coat protein,” Sem Virol., 1997, Vol. 8(3): 176-185; Delebecque et al., “Organization of intracellular reactions with rationally designed RNA assemblies,” Science, 2011, Vol. 333: 470-474; Mali et al., “Cas9 transcriptional activators for target specificity screening and paired nickases for cooperative genome engineering,” Nat. Biotechnol., 2013, Vol.31: 833-838; and Zalatan et al., “Engineering complex synthetic transcriptional programs with CRISPR RNA scaffolds,” Cell, 2015, Vol.160: 339-350, each of which are incorporated herein by reference in their entireties. Other systems include the PP7 hairpin, which specifically recruits the PCP protein, and the “coin” hairpin, which specifically recruits the Com protein. See Zalatan et al.

[0699] The nucleotide sequence of the MS2 hairpin (or equivalently referred to as the “MS2 aptamer”) is: GCCAACATGAGGATCACCCATGTCTGCAGGGCC (SEQ ID NO: 763).

[0700] The amino acid sequence of the MCP or MS2cp is:

(SEQ ID NO: 764)
GSASNFTQFVLVDNGGTGDVTVAPSNFANGVAEWISSNSRSQAYKVTCS
VRQSSAQNRKYTIKVEVPKVATQTVGGEELPVAGWRSYLNMELTIPIFA
TNSDCELIVKAMQGLLKDGNPIPSAIAANSGIY.

[0701] F. UGI Domain

[0702] In other embodiments, the multi-flap prime editors described herein may comprise one or more uracil glycosylase inhibitor domains. The term “uracil glycosylase inhibitor (UGI)” or “UGI domain,” as used herein, refers to a protein that is capable of inhibiting a uracil-DNA glycosylase base-excision repair enzyme. In some embodiments, a UGI domain comprises a wild-type UGI or a UGI as set forth in SEQ ID NO: 3873. In some embodiments, the UGI proteins provided herein include fragments of UGI and proteins homologous to a UGI or a UGI fragment. For example, in some embodiments, a UGI domain comprises a fragment of the amino acid sequence set forth in SEQ ID NO: 3873. In some embodiments, a UGI fragment comprises an amino acid sequence that comprises at least 60%, at least 65%, at least 70%, at least 75%, at least 80%, at least 85%, at least 90%, at least 95%, at least 96%, at least 97%, at least 98%, at least 99%, or at least 99.5% of the amino acid sequence as set forth in SEQ ID NO: 3873. In some embodiments, a UGI comprises an amino acid sequence homologous to the amino acid sequence set forth in SEQ ID NO: 3873, or an amino acid sequence homologous to a fragment of the amino acid sequence set forth in SEQ ID NO: 3873. In some embodiments, proteins comprising UGI or fragments of UGI or homologs of UGI or UGI fragments are referred to as “UGI variants.” A UGI variant shares homology to UGI, or a fragment thereof. For example a UGI variant is at least 70% identical, at least 75% identical, at least 80% identical, at least 85% identical, at least 90% identical, at least 95% identical, at least 96% identical, at least 97% identical, at least 98% identical, at least 99% identical, at least 99.5% identical, or at least 99.9% identical to a wild type UGI or a UGI as set forth in SEQ ID NO: 3873. In some embodiments, the UGI variant comprises a fragment of UGI, such that the fragment is at least 70% identical, at least 80% identical, at least 90% identical, at least 95% identical, at least 96% identical, at least 97% identical, at least 98% identical, at least 99% identical, at least 99.5% identical, or at least 99.9% to the corresponding fragment of wild-type UGI or a UGI as set forth in SEQ ID NO: 3873. In some embodiments, the UGI comprises the following amino acid sequence:

[0703] Uracil-DNA glycosylase inhibitor:

>sp|P14739|UNGI_BPPB2
(SEQ ID NO: 3873)
MTNLSDIIEKETGKQLVIQESILMLPEEVEEVIGNKPESDILVHTAYDE
STDENVMLLTSDAPEYKPWALVIQDSNGENKIKML.

[0704] The multi-flap prime editors described herein may comprise more than one UGI domain, which may be separated by one or more linkers as described herein.

[0705] G. Additional PE Elements

[0706] In certain embodiments, the multi-flap prime editors described herein may comprise an inhibitor of base repair. The term “inhibitor of base repair” or “IBR” refers to a protein that is capable in inhibiting the activity of a nucleic acid repair enzyme, for example a base excision repair enzyme. In some embodiments, the IBR is an inhibitor of OGG base excision repair. In some embodiments, the IBR is an inhibitor of base excision repair (“iBER”). Exemplary inhibitors of base excision repair include inhibitors of APE1, Endo III, Endo IV, Endo V, Endo VIII, Fpg, hOGG1, hNEIL1, T7 Endol, T4PDG, UDG, hSMUG1, and hAAG. In some embodiments, the IBR is an inhibitor of Endo V or hAAG. In some embodiments, the IBR is an iBER that may be a catalytically inactive glycosylase or catalytically inactive dioxygenase or a small molecule or peptide inhibitor of an oxidase, or variants threreof. In some embodiments, the IBR is an iBER that may be a TDG inhibitor, MBD4 inhibitor or an inhibitor of an AlkBH enzyme. In some embodiments, the IBR is an iBER that comprises a catalytically inactive TDG or catalytically inactive MBD4. An exemplary catalytically inactive TDG is an N140A mutant of SEQ ID NO: 3872 (human TDG).

[0707] Some exemplary glycosylases are provided below. The catalytically inactivated variants of any of these glycosylase domains are iBERs that may be fused to the napDNAbp or polymerase domain of the multi-flap prime editors provided in this disclosure.

OGG (human)
(SEQ ID NO: 3937)
MPARALLPRRMGHRTLASTPALWASIPCPRSELRLDLVLPSGQSFRWRE
QSPAHWSGVLADQVWTLTQTEEQLHCTVYRGDKSQASRPTPDELEAVRK
YFQLDVTLAQLYHHWGSVDSHFQEVAQKFQGVRLLRQDPIECLFSFICS
SNNNIARITGMVERLCQAFGPRLIQLDDVTYHGFPSLQALAGPEVEAHL
RKLGLGYRARYVSASARAILEEQGGLAWLQQLRESSYEEAHKALCILPG
VGTKVADCICLMALDKPQAVPVDVHMWHIAQRDYSWHPTTSQAKGPSPQ
TNKELGNFFRSLWGPYAGWAQAVLFSADLRQSRHAQEPPAKRRKGSKGP
EG
MPG (human)
(SEQ ID NO: 3938)
MVTPALQMKKPKQFCRRMGQKKQRPARAGQPHSSSDAAQAPAEQPHSSS
DAAQAPCPRERCLGPPTTPGPYRSIYFSSPKGHLTRLGLEFFDQPAVPL
ARAFLGQVLVRRLPNGTELRGRIVETEAYLGPEDEAAHSRGGRQTPRNR
GMFMKPGTLYVYIIYGMYFCMNISSQGDGACVLLRALEPLEGLETMRQL
RSTLRKGTASRVLKDRELCSGPSKLCQALAINKSFDQRDLAQDEAVWLE
RGPLEPSEPAVVAAARVGVGHAGEWARKPLRFYVRGSPWVSVVDRVAEQ
DTQA
MBD4 (human)
(SEQ ID NO: 3871)
MGTTGLESLSLGDRGAAPTVTSSERLVPDPPNDLRKEDVAMELERVGED
EEQMMIKRSSECNPLLQEPIASAQFGATAGTECRKSVPCGWERVVKQRL
FGKTAGRFDVYFISPQGLKFRSKSSLANYLHKNGETSLKPEDFDFTVLS
KRGIKSRYKDCSMAALTSHLQNQSNNSNWNLRTRSKCKKDVFMPPSSSS
ELQESRGLSNFTSTHLLLKEDEGVDDVNFRKVRKPKGKVTILKGIPIKK
TKKGCRKSCSGFVQSDSKRESVCNKADAESEPVAQKSQLDRTVCISDAG
ACGETLSVTSEENSLVKKKERSLSSGSNFCSEQKTSGIINKFCSAKDSE
HNEKYEDTFLESEEIGTKVEVVERKEHLHTDILKRGSEMDNNCSPTRKD
FTGEKIFQEDTIPRTQIERRKTSLYFSSKYNKEALSPPRRKAFKKWTPP
RSPFNLVQETLFHDPWKLLIATIFLNRTSGKMAIPVLWKFLEKYPSAEV
ARTADWRDVSELLKPLGLYDLRAKTIVKFSDEYLTKQWKYPIELHGIGK
YGNDSYRIFCVNEWKQVHPEDHKLNKYHDWLWENHEKLSLS
TDG (human)
(SEQ ID NO: 3872)
MEAENAGSYSLQQAQAFYTFPFQQLMAEAPNMAVVNEQQMPEEVPAPAP
AQEPVQEAPKGRKRKPRTTEPKQPVEPKKPVESKKSGKSAKSKEKQEKI
TDTFKVKRKVDRFNGVSEAELLTKTLPDILTFNLDIVIIGINPGLMAAY
KGHHYPGPGNHFWKCLFMSGLSEVQLNHMDDHTLPGKYGIGFTNMVERT
TPGSKDLSSKEFREGGRILVQKLQKYQPRIAVFNGKCIYEIFSKEVFGV
KVKNLEFGLQPHKIPDTETLCYVMPSSSARCAQFPRAQDKVHYYIKLKD
LRDQLKGIERNMDVQEVQYTFDLQLAQEDAKKMAVKEEKYDPGYEAAYG
GAYGENPCSSEPCGFSSNGLIESVELRGESAFSGIPNGQWMTQSFTDQI
PSFSNHCGTQEQEEESHA

[0708] In some embodiments, the fusion proteins described herein may comprise one or more heterologous protein domains (e.g., about or more than about 1, 2, 3, 4, 5, 6, 7, 8, 9, 10, or more domains in addition to the prime editor components). A fusion protein may comprise any additional protein sequence, and optionally a linker sequence between any two domains. Other exemplary features that may be present are localization sequences, such as cytoplasmic localization sequences, export sequences, such as nuclear export sequences, or other localization sequences, as well as sequence tags that are useful for solubilization, purification, or detection of the fusion proteins.

[0709] Examples of protein domains that may be fused to a multi-flap prime editor or component thereof (e.g., the napDNAbp domain, the polymerase domain, or the NLS domain) include, without limitation, epitope tags, and reporter gene sequences. Non-limiting examples of epitope tags include histidine (His) tags, V5 tags, FLAG tags, influenza hemagglutinin (HA) tags, Myc tags, VSV-G tags, and thioredoxin (Trx) tags. Examples of reporter genes include, but are not limited to, glutathione-5-transferase (GST), horseradish peroxidase (HRP), chloramphenicol acetyltransferase (CAT), beta-galactosidase, beta-glucuronidase, luciferase, green fluorescent protein (GFP), HcRed, DsRed, cyan fluorescent protein (CFP), yellow fluorescent protein (YFP), and autofluorescent proteins including blue fluorescent protein (BFP). A multi-flap prime editor may be fused to a gene sequence encoding a protein or a fragment of a protein that bind DNA molecules or bind other cellular molecules, including, but not limited to, maltose binding protein (MBP), S-tag, Lex A DNA binding domain (DBD) fusions, GAL4 DNA binding domain fusions, and herpes simplex virus (HSV) BP16 protein fusions. Additional domains that may form part of a prime editor are described in US Patent Publication No. 2011/0059502, published Mar. 10, 2011 and incorporated herein by reference in its entirety.

[0710] In an aspect of the disclosure, a reporter gene which includes, but is not limited to, glutathione-5-transferase (GST), horseradish peroxidase (HRP), chloramphenicol acetyltransferase (CAT) beta-galactosidase, beta-glucuronidase, luciferase, green fluorescent protein (GFP), HcRed, DsRed, cyan fluorescent protein (CFP), yellow fluorescent protein (YFP), and autofluorescent proteins including blue fluorescent protein (BFP), may be introduced into a cell to encode a gene product which serves as a marker by which to measure the alteration or modification of expression of the gene product. In certain embodiments of the disclosure the gene product is luciferase. In a further embodiment of the disclosure the expression of the gene product is decreased.

[0711] Suitable protein tags provided herein include, but are not limited to, biotin carboxylase carrier protein (BCCP) tags, myc-tags, calmodulin-tags, FLAG-tags, hemagglutinin (HA)-tags, polyhistidine tags, also referred to as histidine tags or His-tags, maltose binding protein (MBP)-tags, nus-tags, glutathione-S-transferase (GST)-tags, green fluorescent protein (GFP)-tags, thioredoxin-tags, S-tags, Softags (e.g., Softag 1, Softag 3), strep-tags , biotin ligase tags, FlAsH tags, V5 tags, and SBP-tags. Additional suitable sequences will be apparent to those of skill in the art. In some embodiments, the fusion protein comprises one or more His tags.

[0712] In some embodiments of the present disclosure, the activity of the multi-flap prime editing system may be temporally regulated by adjusting the residence time, the amount, and/or the activity of the expressed components of the PE system. For example, as described herein, the PE may be fused with a protein domain that is capable of modifying the intracellular half-life of the PE. In certain embodiments involving two or more vectors (e.g., a vector system in which the components described herein are encoded on two or more separate vectors), the activity of the PE system may be temporally regulated by controlling the timing in which the vectors are delivered. For example, in some embodiments a vector encoding the nuclease system may deliver the PE prior to the vector encoding the template. In other embodiments, the vector encoding the PEgRNA may deliver the guide prior to the vector encoding the PE system. In some embodiments, the vectors encoding the PE system and PEgRNA are delivered simultaneously. In certain embodiments, the simultaneously delivered vectors temporally deliver, e.g., the PE, PEgRNA, and/or second strand guide RNA components. In further embodiments, the RNA (such as, e.g., the nuclease transcript) transcribed from the coding sequence on the vectors may further comprise at least one element that is capable of modifying the intracellular half-life of the RNA and/or modulating translational control. In some embodiments, the half-life of the RNA may be increased. In some embodiments, the half-life of the RNA may be decreased. In some embodiments, the element may be capable of increasing the stability of the RNA. In some embodiments, the element may be capable of decreasing the stability of the RNA. In some embodiments, the element may be within the 3′ UTR of the RNA. In some embodiments, the element may include a polyadenylation signal (PA). In some embodiments, the element may include a cap, e.g., an upstream mRNA or PEgRNA end. In some embodiments, the RNA may comprise no PA such that it is subject to quicker degradation in the cell after transcription. In some embodiments, the element may include at least one AU-rich element (ARE). The AREs may be bound by ARE binding proteins (ARE-BPs) in a manner that is dependent upon tissue type, cell type, timing, cellular localization, and environment. In some embodiments the destabilizing element may promote RNA decay, affect RNA stability, or activate translation. In some embodiments, the ARE may comprise 50 to 150 nucleotides in length. In some embodiments, the ARE may comprise at least one copy of the sequence AUUUA. In some embodiments, at least one ARE may be added to the 3′ UTR of the RNA. In some embodiments, the element may be a Woodchuck Hepatitis Virus (WHP).

[0713] Posttranscriptional Regulatory Element (WPRE), which creates a tertiary structure to enhance expression from the transcript. In further embodiments, the element is a modified and/or truncated WPRE sequence that is capable of enhancing expression from the transcript, as described, for example in Zufferey et al., J Virol, 73(4): 2886-92 (1999) and Flajolet et al., J Virol, 72(7): 6175-80 (1998). In some embodiments, the WPRE or equivalent may be added to the 3′ UTR of the RNA. In some embodiments, the element may be selected from other RNA sequence motifs that are enriched in either fast- or slow-decaying transcripts.

[0714] In some embodiments, the vector encoding the PE or the PEgRNA may be self-destroyed via cleavage of a target sequence present on the vector by the PE system. The cleavage may prevent continued transcription of a PE or a PEgRNA from the vector. Although transcription may occur on the linearized vector for some amount of time, the expressed transcripts or proteins subject to intracellular degradation will have less time to produce off-target effects without continued supply from expression of the encoding vectors.

### [6] PEgRNAs

[0715] The multi-flap prime editing system described herein contemplates the use of any suitable PEgRNAs. The mechanism of target-primed reverse transcription (TPRT) can be leveraged or adapted for conducting precision and versatile CRISPR/Cas-based genome editing through the use of a specially configured guide RNA comprising a reverse transcription (RT) template sequence that codes for the desired nucleotide change. The application refers to this specially configured guide RNA as an “extended guide RNA” or a “PEgRNA” since the RT template sequence can be provided as an extension of a standard or traditional guide RNA molecule. The application contemplates any suitable configuration or arrangement for the extended guide RNAs for use in dual-flap and quadruple-flap prime editing.

[0716] The general designs of pegRNAs used for dual-flap and multi-flap prime editing are shown in FIG. 92. pegRNAs used for dual-flap and multi-flap prime editing have a similar design to those used for classic prime editing, however it is not necessary for the RT template region to encode any homology to the target locus. Instead, the two pegRNAs can in various embodiments contain RT templates that encode the synthesis of 3′ flaps whose 3′ ends are reverse complement sequences of one another. This complementarity between the 3′ flaps promotes their annealing and replacement of the endogenous DNA sequence with the intended new DNA sequence. This necessitates that the 5′ regions of the RT templates in the two pegRNAs are reverse complement sequences to one another, and this amount of complementarity can vary (FIG. 92).

[0717] PEgRNA Architecture

[0718] FIG. 3A shows one embodiment of an extended guide RNA usable in the multi-flap prime editing system disclosed herein whereby a traditional guide RNA (the green portion) includes a ˜20 nt protospacer sequence and a gRNA core region, which binds with the napDNAbp. In this embodiment, the guide RNA includes an extended RNA segment at the 5′ end, i.e., a 5′ extension. In this embodiment, the 5′extension includes a reverse transcription template sequence, a reverse transcription primer binding site, and an optional 5-20 nucleotide linker sequence. As shown in FIGS. 1A-1B, the RT primer binding site hybrizes to the free 3′ end that is formed after a nick is formed in the non-target strand of the R-loop, thereby priming reverse transcriptase for DNA polymerization in the 5′-3′ direction.

[0719] FIG. 3B shows another embodiment of an extended guide RNA usable in the prime editing system disclosed herein whereby a traditional guide RNA (the green portion) includes a ˜20 nt protospacer sequence and a gRNA core, which binds with the napDNAbp. In this embodiment, the guide RNA includes an extended RNA segment at the 3′ end, i.e., a 3′ extension. In this embodiment, the 3′extension includes a reverse transcription template sequence, and a reverse transcription primer binding site. As shown in FIGS. 1C-1D, the RT primer binding site hybrizes to the free 3′ end that is formed after a nick is formed in the non-target strand of the R-loop, thereby priming reverse transcriptase for DNA polymerization in the 5′-3′ direction.

[0720] FIG. 3C shows another embodiment of an extend guide RNA usable in the prime editing system disclosed herein whereby a traditional guide RNA (the green portion) includes a ˜20 nt protospacer sequence and a gRNA core, which binds with the napDNAbp. In this embodiment, the guide RNA includes an extended RNA segment at an intermolecular position within the gRNA core, i.e., an intramolecular extension. In this embodiment, the intramolecular extension includes a reverse transcription template sequence, and a reverse transcription primer binding site. The RT primer binding site hybrizes to the free 3′ end that is formed after a nick is formed in the non-target strand of the R-loop, thereby priming reverse transcriptase for DNA polymerization in the 5′-3′ direction.

[0721] In one embodiment, the position of the intermolecular RNA extension is not in the protospacer sequence of the guide RNA. In another embodiment, the position of the intermolecular RNA extension in the gRNA core. In still another embodiment, the position of the intermolecular RNA extension is any with the guide RNA molecule except within the protospacer sequence, or at a position which disrupts the protospacer sequence.

[0722] In one embodiment, the intermolecular RNA extension is inserted downstream from the 3′ end of the protospacer sequence. In another embodiment, the intermolecular RNA extension is inserted at least 1 nucleotide, at least 2 nucleotides, at least 3 nucleotides, at least 4 nucleotides, at least 5 nucleotides, at least 6 nucleotides, at least 7 nucleotides, at least 8 nucleotides, at least 9 nucleotides, at least 10 nucleotides, at least 11 nucleotides, at least 12 nucleotides, at least 13 nucleotides, at least 14 nucleotides, at least 15 nucleotides, at least 16 nucleotides, at least 17 nucleotides, at least 18 nucleotides, at least 19 nucleotides, at least 20 nucleotides, at least 21 nucleotides, at least 22 nucleotides, at least 23 nucleotides, at least 24 nucleotides, at least 25 nucleotides downstream of the 3′ end of the protospacer sequence.

[0723] In other embodiments, the intermolecular RNA extension is inserted into the gRNA, which refers to the portion of the guide RNA corresponding or comprising the tracrRNA, which binds and/or interacts with the Cas9 protein or equivalent thereof (i.e, a different napDNAbp). Preferably the insertion of the intermolecular RNA extension does not disrupt or minimally disrupts the interaction betweeen the tracrRNA portion and the napDNAbp.

[0724] The length of the RNA extension (which includes at least the RT template and primer binding site, e.g., see FIG. 92) can be any useful length. In various embodiments, the RNA extension is at least 5 nucleotides, at least 6 nucleotides, at least 7 nucleotides, at least 8 nucleotides, at least 9 nucleotides, at least 10 nucleotides, at least 11 nucleotides, at least 12 nucleotides, at least 13 nucleotides, at least 14 nucleotides, at least 15 nucleotides, at least 16 nucleotides, at least 17 nucleotides, at least 18 nucleotides, at least 19 nucleotides, at least 20 nucleotides, at least 21 nucleotides, at least 22 nucleotides, at least 23 nucleotides, at least 24 nucleotides, at least 25 nucleotides, at least 30 nucleotides, at least 40 nucleotides, at least 50 nucleotides, at least 60 nucleotides, at least 70 nucleotides, at least 80 nucleotides, at least 90 nucleotides, at least 100 nucleotides, at least 200 nucleotides, at least 300 nucleotides, at least 400 nucleotides, or at least 500 nucleotides in length.

[0725] The RT template sequence can also be any suitable length. For example, the RT template sequence can be at least 3 nucleotides, at least 4 nucleotides, at least 5 nucleotides, at least 6 nucleotides, at least 7 nucleotides, at least 8 nucleotides, at least 9 nucleotides, at least 10 nucleotides, at least 11 nucleotides, at least 12 nucleotides, at least 13 nucleotides, at least 14 nucleotides, at least 15 nucleotides, at least 16 nucleotides, at least 17 nucleotides, at least 18 nucleotides, at least 19 nucleotides, at least 20 nucleotides, at least 30 nucleotides, at least 40 nucleotides, at least 50 nucleotides, at least 60 nucleotides, at least 70 nucleotides, at least 80 nucleotides, at least 90 nucleotides, at least 100 nucleotides, at least 200 nucleotides, at least 300 nucleotides, at least 400 nucleotides, or at least 500 nucleotides in length.

[0726] In still other embodiments, wherein the reverse transcription primer binding site sequence is at least 3 nucleotides, at least 4 nucleotides, at least 5 nucleotides, at least 6 nucleotides, at least 7 nucleotides, at least 8 nucleotides, at least 9 nucleotides, at least 10 nucleotides, at least 11 nucleotides, at least 12 nucleotides, at least 13 nucleotides, at least 14 nucleotides, at least 15 nucleotides, at least 16 nucleotides, at least 17 nucleotides, at least 18 nucleotides, at least 19 nucleotides, at least 20 nucleotides, at least 30 nucleotides, at least 40 nucleotides, at least 50 nucleotides, at least 60 nucleotides, at least 70 nucleotides, at least 80 nucleotides, at least 90 nucleotides, at least 100 nucleotides, at least 200 nucleotides, at least 300 nucleotides, at least 400 nucleotides, or at least 500 nucleotides in length.

[0727] In other embodiments, the optional linker or spacer sequence is at least 3 nucleotides, at least 4 nucleotides, at least 5 nucleotides, at least 6 nucleotides, at least 7 nucleotides, at least 8 nucleotides, at least 9 nucleotides, at least 10 nucleotides, at least 11 nucleotides, at least 12 nucleotides, at least 13 nucleotides, at least 14 nucleotides, at least 15 nucleotides, at least 16 nucleotides, at least 17 nucleotides, at least 18 nucleotides, at least 19 nucleotides, at least 20 nucleotides, at least 30 nucleotides, at least 40 nucleotides, at least 50 nucleotides, at least 60 nucleotides, at least 70 nucleotides, at least 80 nucleotides, at least 90 nucleotides, at least 100 nucleotides, at least 200 nucleotides, at least 300 nucleotides, at least 400 nucleotides, or at least 500 nucleotides in length.

[0728] The RT template sequence, in certain embodiments, encodes a single-stranded DNA molecule which is homologous to the non-target strand (and thus, complementary to the corresponding site of the target strand) but includes one or more nucleotide changes. The least one nucleotide change may include one or more single-base nucleotide changes, one or more deletions, and one or more insertions.

[0729] As depicted in FIG. 1G, the synthesized single-stranded DNA product of the RT template sequence is homologous to the non-target strand and contains one or more nucleotide changes. The single-stranded DNA product of the RT template sequence hybridizes in equilibrium with the complementary target strand sequence, thereby displacing the homologous endogenous target strand sequence. The displaced endogenous strand may be referred to in some embodiments as a 5′ endogenous DNA flap species (e.g., see FIG. 1E). This 5′ endogenous DNA flap species can be removed by a 5′ flap endonuclease (e.g., FEN1) and the single-stranded DNA product, now hybridized to the endogenous target strand, may be ligated, thereby creating a mismatch between the endogenous sequence and the newly synthesized strand. The mismatch may be resolved by the cell's innate DNA repair and/or replication processes.

[0730] In various embodiments, the nucleotide sequence of the RT template sequence corresponds to the nucleotide sequence of the non-target strand which becomes displaced as the 5′ flap species and which overlaps with the site to be edited.

[0731] In various embodiments of the extended guide RNAs, the reverse transcription template sequence may encode a single-strand DNA flap that is complementary to an endogenous DNA sequence adjacent to a nick site, wherein the single-strand DNA flap comprises a desired nucleotide change. The single-stranded DNA flap may displace an endogenous single-strand DNA at the nick site. The displaced endogenous single-strand DNA at the nick site can have a 5′ end and form an endogenous flap, which can be excised by the cell. In various embodiments, excision of the 5′ end endogenous flap can help drive product formation since removing the 5′ end endogenous flap encourages hybridization of the single-strand 3′ DNA flap to the corresponding complementary DNA strand, and the incorporation or assimilation of the desired nucleotide change carried by the single-strand 3′ DNA flap into the target DNA.

[0732] In various embodiments of the extended guide RNAs, the cellular repair of the single-strand DNA flap results in installation of the desired nucleotide change, thereby forming a desired product.

[0733] In still other embodiments, the desired nucleotide change is installed in an editing window that is between about −5 to +5 of the nick site, or between about −10 to +10 of the nick site, or between about −20 to +20 of the nick site, or between about −30 to +30 of the nick site, or between about −40 to +40 of the nick site, or between about −50 to +50 of the nick site, or between about −60 to +60 of the nick site, or between about −70 to +70 of the nick site, or between about −80 to +80 of the nick site, or between about −90 to +90 of the nick site, or between about −100 to +100 of the nick site, or between about −200 to +200 of the nick site.In other embodiments, the desired nucleotide change is installed in an editing window that is between about +1 to +2 from the nick site, or about +1 to +3, +1 to +4, +1 to +5, +1 to +6, +1 to +7, +1 to +8, +1 to +9, +1 to +10, +1 to +11, +1 to +12, +1 to +13, +1 to +14, +1 to +15, +1 to +16, +1 to +17, +1 to +18, +1 to +19, +1 to +20, +1 to +21, +1 to +22, +1 to +23, +1 to +24, +1 to +25, +1 to +26, +1 to +27, +1 to +28, +1 to +29, +1 to +30, +1 to +31, +1 to +32, +1 to +33, +1 to +34, +1 to +35, +1 to +36, +1 to +37, +1 to +38, +1 to +39, +1 to +40, +1 to +41, +1 to +42, +1 to +43, +1 to +44, +1 to +45, +1 to +46, +1 to +47, +1 to +48, +1 to +49, +1 to +50, +1 to +51, +1 to +52, +1 to +53, +1 to +54, +1 to +55, +1 to +56, +1 to +57, +1 to +58, +1 to +59, +1 to +60, +1 to +61, +1 to +62, +1 to +63, +1 to +64, +1 to +65, +1 to +66, +1 to +67, +1 to +68, +1 to +69, +1 to +70, +1 to +71, +1 to +72, +1 to +73, +1 to +74, +1 to +75, +1 to +76, +1 to +77, +1 to +78, +1 to +79, +1 to +80, +1 to +81, +1 to +82, +1 to +83, +1 to +84, +1 to +85, +1 to +86, +1 to +87, +1 to +88, +1 to +89, +1 to +90, +1 to +90, +1 to +91, +1 to +92, +1 to +93, +1 to +94, +1 to +95, +1 to +96, +1 to +97, +1 to +98, +1 to +99, +1 to +100, +1 to +101, +1 to +102, +1 to +103, +1 to +104, +1 to +105, +1 to +106, +1 to +107, +1 to +108, +1 to +109, +1 to +110, +1 to +111, +1 to +112, +1 to +113, +1 to +114, +1 to +115, +1 to +116, +1 to +117, +1 to +118, +1 to +119, +1 to +120, +1 to +121, +1 to +122, +1 to +123, +1 to +124, or +1 to +125 from the nick site.

[0734] In still other embodiments, the desired nucleotide change is installed in an editing window that is between about +1 to +2 from the nick site, or about +1 to +5, +1 to +10, +1 to +15, +1 to +20, +1 to +25, +1 to +30, +1 to +35, +1 to +40, +1 to +45, +1 to +50, +1 to +55, +1 to +100, +1 to +105, +1 to +110, +1 to +115, +1 to +120, +1 to +125, +1 to +130, +1 to +135, +1 to +140, +1 to +145, +1 to +150, +1 to +155, +1 to +160, +1 to +165, +1 to +170, +1 to +175, +1 to +180, +1 to +185, +1 to +190, +1 to +195, or +1 to +200, from the nick site.

[0735] In various aspects, the extended guide RNAs are modified versions of a guide RNA. Guide RNAs maybe naturally occurring, expressed from an encoding nucleic acid, or synthesized chemically. Methods are well known in the art for obtaining or otherwise synthesizing guide RNAs and for determining the appropriate sequence of the guide RNA, including the protospacer sequence which interacts and hybridizes with the target strand of a genomic target site of interest.

[0736] In various embodiments, the particular design aspects of a guide RNA sequence will depend upon the nucleotide sequence of a genomic target site of interest (i.e., the desired site to be edited) and the type of napDNAbp (e.g., Cas9 protein) present in the multi-flap prime editing systems described herein, among other factors, such as PAM sequence locations, percent G/C content in the target sequence, the degree of microhomology regions, secondary structures, etc.

[0737] In general, a guide sequence is any polynucleotide sequence having sufficient complementarity with a target polynucleotide sequence to hybridize with the target sequence and direct sequence-specific binding of a napDNAbp (e.g., a Cas9, Cas9 homolog, or Cas9 variant) to the target sequence. In some embodiments, the degree of complementarity between a guide sequence and its corresponding target sequence, when optimally aligned using a suitable alignment algorithm, is about or more than about 50%, 60%, 75%, 80%, 85%, 90%, 95%, 97.5%, 99%, or more. Optimal alignment may be determined with the use of any suitable algorithm for aligning sequences, non-limiting example of which include the Smith-Waterman algorithm, the Needleman-Wunsch algorithm, algorithms based on the Burrows-Wheeler Transform (e.g., the Burrows Wheeler Aligner), ClustalW, Clustal X, BLAT, Novoalign (Novocraft Technologies, ELAND (Illumina, San Diego, Calif.), SOAP (available at soap.genomics.org.cn), and Maq (available at maq.sourceforge.net). In some embodiments, a guide sequence is about or more than about 5, 10, 11, 12, 13, 14, 15, 16, 17, 18, 19, 20, 21, 22, 23, 24, 25, 26, 27, 28, 29, 30, 35, 40, 45, 50, 75, or more nucleotides in length.

[0738] In some embodiments, a guide sequence is less than about 75, 50, 45, 40, 35, 30, 25, 20, 15, 12, or fewer nucleotides in length. The ability of a guide sequence to direct sequence-specific binding of a multi-flap prime editor to a target sequence may be assessed by any suitable assay. For example, the components of a multi-flap prime editor, including the guide sequence to be tested, may be provided to a host cell having the corresponding target sequence, such as by transfection with vectors encoding the components of a multi-flap prime editor disclosed herein, followed by an assessment of preferential cleavage within the target sequence, such as by Surveyor assay as described herein. Similarly, cleavage of a target polynucleotide sequence may be evaluated in a test tube by providing the target sequence, components of a multi-flap prime editor, including the guide sequence to be tested and a control guide sequence different from the test guide sequence, and comparing binding or rate of cleavage at the target sequence between the test and control guide sequence reactions. Other assays are possible, and will occur to those skilled in the art.

[0739] A guide sequence may be selected to target any target sequence. In some embodiments, the target sequence is a sequence within a genome of a cell. Exemplary target sequences include those that are unique in the target genome. For example, for the S. pyogenes Cas9, a unique target sequence in a genome may include a Cas9 target site of the form MMMMMMMMNNNNNNNNNNNNXGG (SEQ ID NO: 204) where NNNNNNNNNNNNXGG (SEQ ID NO: 205) (N is A, G, T, or C; and X can be anything). A unique target sequence in a genome may include an S. pyogenes Cas9 target site of the form MMMMMMMMMNNNNNNNNNNNXGG (SEQ ID NO: 206) where NNNNNNNNNNNXGG (SEQ ID NO: 207) (N is A, G, T, or C; and X can be anything). For the S. thermophilus CRISPR1Cas9, a unique target sequence in a genome may include a Cas9 target site of the form MMMMMMMMNNNNNNNNNNNNXXAGAAW (SEQ ID NO: 208) where NNNNNNNNNNNNXXAGAAW (SEQ ID NO: 209) (N is A, G, T, or C; X can be anything; and W is A or T). A unique target sequence in a genome may include an S. thermophilus CRISPR 1 Cas9 target site of the form MMMMMMMMMNNNNNNNNNNNXXAGAAW (SEQ ID NO: 210) where NNNNNNNNNNNXXAGAAW (SEQ ID NO: 211) (N is A, G, T, or C; X can be anything; and W is A or T). For the S. pyogenes Cas9, a unique target sequence in a genome may include a Cas9 target site of the form MMMMMMMMNNNNNNNNNNNNXGGXG (SEQ ID NO: 212) where NNNNNNNNNNNNXGGXG (SEQ ID NO: 213) (N is A, G, T, or C; and X can be anything). A unique target sequence in a genome may include an S. pyogenes Cas9 target site of the form MMMMMMMMMNNNNNNNNNNNXGGXG (SEQ ID NO: 214) where NNNNNNNNNNNXGGXG (SEQ ID NO: 215) (N is A, G, T, or C; and X can be anything). In each of these sequences “M” may be A, G, T, or C, and need not be considered in identifying a sequence as unique.

[0740] As used herein in a PEgRNA or guide RNA sequence, unless indicated otherwise, it should be appreciated that the letter “T” or “thymine” indicates a nucleobase in a DNA sequence that encodes the PEgRNA or guide RNA sequence, and is intended to refer to a uracil (U) nucleobase of the PEgRNA or guide RNA or any chemically modified uracil nucleobase known in the art, such as 5-methoxyuracil.

[0741] In some embodiments, a guide sequence is selected to reduce the degree of secondary structure within the guide sequence. Secondary structure may be determined by any suitable polynucleotide folding algorithm. Some programs are based on calculating the minimal Gibbs free energy. An example of one such algorithm is mFold, as described by Zuker and Stiegler (Nucleic Acids Res. 9 (1981), 133-148). Another example folding algorithm is the online webserver RNAfold, developed at Institute for Theoretical Chemistry at the University of Vienna, using the centroid structure prediction algorithm (see e.g. A. R. Gruber et al., 2008, Cell 106(1): 23-24; and P A Can and G M Church, 2009, Nature Biotechnology 27(12): 1151-62). Further algorithms may be found in U.S. application Ser. No. 61/836,080; Broad Reference BI-2013/004A); incorporated herein by reference.

[0742] In general, a tracr mate sequence includes any sequence that has sufficient complementarity with a tracr sequence to promote one or more of: (1) excision of a guide sequence flanked by tracr mate sequences in a cell containing the corresponding tracr sequence; and (2) formation of a complex at a target sequence, wherein the complex comprises the tracr mate sequence hybridized to the tracr sequence. In general, degree of complementarity is with reference to the optimal alignment of the tracr mate sequence and tracr sequence, along the length of the shorter of the two sequences. Optimal alignment may be determined by any suitable alignment algorithm, and may further account for secondary structures, such as self-complementarity within either the tracr sequence or tracr mate sequence. In some embodiments, the degree of complementarity between the tracr sequence and tracr mate sequence along the length of the shorter of the two when optimally aligned is about or more than about 25%, 30%, 40%, 50%, 60%, 70%, 80%, 90%, 95%, 97.5%, 99%, or higher. In some embodiments, the tracr sequence is about or more than about 5, 6, 7, 8, 9, 10, 11, 12, 13, 14, 15, 16, 17, 18, 19, 20, 25, 30, 40, 50, or more nucleotides in length. In some embodiments, the tracr sequence and tracr mate sequence are contained within a single transcript, such that hybridization between the two produces a transcript having a secondary structure, such as a hairpin. Preferred loop forming sequences for use in hairpin structures are four nucleotides in length, and most preferably have the sequence GAAA. However, longer or shorter loop sequences may be used, as may alternative sequences. The sequences preferably include a nucleotide triplet (for example, AAA), and an additional nucleotide (for example C or G). Examples of loop forming sequences include CAAA and AAAG. In an embodiment of the invention, the transcript or transcribed polynucleotide sequence has at least two or more hairpins. In preferred embodiments, the transcript has two, three, four or five hairpins. In a further embodiment of the invention, the transcript has at most five hairpins. In some embodiments, the single transcript further includes a transcription termination sequence; preferably this is a polyT sequence, for example six T nucleotides. Further non-limiting examples of single polynucleotides comprising a guide sequence, a tracr mate sequence, and a tracr sequence are as follows (listed 5′ to 3′), where “N” represents a base of a guide sequence, the first block of lower case letters represent the tracr mate sequence, and the second block of lower case letters represent the tracr sequence, and the final poly-T sequence represents the transcription terminator:

(1)
(SEQ ID NO: 216)
NNNNNNNNGTTTTTGTACTCTCAAGATTTAGAAATAAATCTTGCAGAAG
CTACAAAGATAAGGCTTCATGCCGAAATCAACACCCTGTCATTTTATGG
CAGGGTGTTTTCGTTATTTAATTTTTT;
(2)
(SEQ ID NO: 217)
NNNNNNNNNNNNNNNNNNGTTTTTGTACTCTCAGAAATGCAGAAGCTAC
AAAGATAAGGCTTCATGCCGAAATCAACACCCTGTCATTTTATGGCAGG
GTGTTTTCGTTATTTAATTTTTT;
(3)
(SEQ ID NO: 218)
NNNNNNNNNNNNNNNNNNNNGTTTTTGTACTCTCAGAAATGCAGAAGCT
ACAAAGATAAGGCTTCATGCCGAAATCAACACCCTGTCATTTTATGGCA
GGGTGTTTTTT;
(4)
(SEQ ID NO: 219)
NNNNNNNNNNNNNNNNNNNNGTTTTAGAGCTAGAAATAGCAAGTTAAAA
TAAGGCTAGTCCGTTATCAACTTGAAAAAGTGGCACCGAGTCGGTGCTT
TTTT;
(5)
(SEQ ID NO: 220)
NNNNNNNNNNNNNNNNNNNNGTTTTAGAGCTAGAAATAGCAAGTTAAAA
TAAGGCTAGTCCGTTATCAACTTGAAAAAGTGTTTTTTT;
AND
(6)
(SEQ ID NO: 221)
NNNNNNNNNNNNNNNNNNNNGTTTTAGAGCTAGAAATAGCAAGTTAAAA
TAAGGCTAGTCCGTTATCATTTTTTTT.

[0743] In some embodiments, sequences (1) to (3) are used in combination with Cas9 from S. thermophilus CRISPR1. In some embodiments, sequences (4) to (6) are used in combination with Cas9 from S. pyogenes. In some embodiments, the tracr sequence is a separate transcript from a transcript comprising the tracr mate sequence.

[0744] It will be apparent to those of skill in the art that in order to target any of the fusion proteins comprising a Cas9 domain and a single-stranded DNA binding protein, as disclosed herein, to a target site, e.g., a site comprising a point mutation to be edited, it is typically necessary to co-express the fusion protein together with a guide RNA, e.g., an sgRNA. As explained in more detail elsewhere herein, a guide RNA typically comprises a tracrRNA framework allowing for Cas9 binding, and a guide sequence, which confers sequence specificity to the Cas9:nucleic acid editing enzyme/domain fusion protein.

[0745] In some embodiments, the guide RNA comprises a structure 5′-[guide sequence]-GUUUUAGAGCUAGAAAUAGCAAGUUAAAAUAAAGGCUAGUCCGUUAUCAACUUGAAAAA GUGGCACCGAGUCGGUGCUUUUU-3′ (SEQ ID NO: 222), wherein the guide sequence comprises a sequence that is complementary to the target sequence. The guide sequence is typically 20 nucleotides long. The sequences of suitable guide RNAs for targeting Cas9:nucleic acid editing enzyme/domain fusion proteins to specific genomic target sites will be apparent to those of skill in the art based on the instant disclosure. Such suitable guide RNA sequences typically comprise guide sequences that are complementary to a nucleic sequence within 50 nucleotides upstream or downstream of the target nucleotide to be edited. Some exemplary guide RNA sequences suitable for targeting any of the provided fusion proteins to specific target sequences are provided herein. Additional guide sequences are well known in the art and can be used with the multi-flap prime editor described herein.

[0746] In other embodiments, the PEgRNAs include those depicted in FIG. 3D.

[0747] In still other embodiments, the PEgRNAs may include those depicted in FIG. 3E.

[0748] FIG. 3D provides the structure of an embodiment of a PEgRNA contemplated herein and which may be designed in accordance with the methodology defined in Example 2. The PEgRNA comprises three main component elements ordered in the 5′ to 3′ direction, namely: a spacer, a gRNA core, and an extension arm at the 3′ end. The extension arm may further be divided into the following structural elements in the 5′ to 3′ direction, namely: a primer binding site (A), an edit template (B), and a homology arm (C). In addition, the PEgRNA may comprise an optional 3′ end modifier region (e1) and an optional 5′ end modifier region (e2). Still further, the PEgRNA may comprise a transcriptional termination signal at the 3′ end of the PEgRNA (not depicted). These structural elements are further defined herein. The depiction of the structure of the PEgRNA is not meant to be limiting and embraces variations in the arrangement of the elements. For example, the optional sequence modifiers (e1) and (e2) could be positioned within or between any of the other regions shown, and not limited to being located at the 3′ and 5′ ends.

[0749] FIG. 3E provides the structure of another embodiment of a PEgRNA contemplated herein may be designed in accordance with the methodology defined in Example 2. The PEgRNA comprises three main component elements ordered in the 5′ to 3′ direction, namely: a spacer, a gRNA core, and an extension arm at the 3′ end. The extension arm may further be divided into the following structural elements in the 5′ to 3′ direction, namely: a primer binding site (A), an edit template (B), and a homology arm (C). In addition, the PEgRNA may comprise an optional 3′ end modifier region (e1) and an optional 5′ end modifier region (e2). Still further, the PEgRNA may comprise a transcriptional termination signal on the 3′ end of the PEgRNA (not depicted). These structural elements are further defined herein. The depiction of the structure of the PEgRNA is not meant to be limiting and embraces variations in the arrangement of the elements. For example, the optional sequence modifiers (e1) and (e2) could be positioned within or between any of the other regions shown, and not limited to being located at the 3′ and 5′ ends.

[0750] PEgRNA Improvements

[0751] The PEgRNAs may also include additional design improvements that may modify the properties and/or characteristics of PEgRNAs thereby improving the efficacy of multi-flap prime editing. In various embodiments, these improvements may belong to one or more of a number of different categories, including but not limited to: (1) designs to enable efficient expression of functional PEgRNAs from non-polymerase III (pol III) promoters, which would enable the expression of longer PEgRNAs without burdensome sequence requirements; (2) improvements to the core, Cas9-binding PEgRNA scaffold, which could improve efficacy; (3) modifications to the PEgRNA to improve RT processivity, enabling the insertion of longer sequences at targeted genomic loci; and (4) addition of RNA motifs to the 5′ or 3′ termini of the PEgRNA that improve PEgRNA stability, enhance RT processivity, prevent misfolding of the PEgRNA, or recruit additional factors important for genome editing.

[0752] In one embodiment, PEgRNA could be designed with polIII promoters to improve the expression of longer-length PEgRNA with larger extension arms. sgRNAs are typically expressed from the U6 snRNA promoter. This promoter recruits pol III to express the associated RNA and is useful for expression of short RNAs that are retained within the nucleus. However, pol III is not highly processive and is unable to express RNAs longer than a few hundred nucleotides in length at the levels required for efficient genome editing. Additionally, pol III can stall or terminate at stretches of U's, potentially limiting the sequence diversity that could be inserted using a PEgRNA. Other promoters that recruit polymerase II (such as pCMV) or polymerase I (such as the U1 snRNA promoter) have been examined for their ability to express longer sgRNAs. However, these promoters are typically partially transcribed, which would result in extra sequence 5′ of the spacer in the expressed PEgRNA, which has been shown to result in markedly reduced Cas9:sgRNA activity in a site-dependent manner. Additionally, while pol III-transcribed PEgRNAs can simply terminate in a run of 6-7 U's, PEgRNAs transcribed from pol II or pol I would require a different termination signal. Often such signals also result in polyadenylation, which would result in undesired transport of the PEgRNA from the nucleus Similarly, RNAs expressed from pol II promoters such as pCMV are typically 5′-capped, also resulting in their nuclear export.

[0753] Previously, Rinn and coworkers screened a variety of expression platforms for the production of long-noncoding RNA-(lncRNA) tagged sgRNAs¹⁸³. These platforms include RNAs expressed from pCMV and that terminate in the ENE element from the MALAT1 ncRNA from humans', the PAN ENE element from KSHV¹⁸⁵, or the 3′ box from U1 snRNA¹⁸⁶. Notably, the MALAT1 ncRNA and PAN ENEs form triple helices protecting the polyA-tail^{184,187} These constructs could also enhance RNA stability. It is contemplated that these expression systems will also enable the expression of longer PEgRNAs.

[0754] In addition, a series of methods have been designed for the cleavage of the portion of the pol II promoter that would be transcribed as part of the PEgRNA, adding either a self-cleaving ribozyme such as the hammerhead¹⁸⁸, pistol¹⁸⁹, hatchet¹⁸⁹, hairpin^{190,} VS¹⁹¹, twister¹⁹², or twister sister¹⁹² ribozymes, or other self-cleaving elements to process the transcribed guide, or a hairpin that is recognized by Csy4¹⁹³ and also leads to processing of the guide. Also, it is hypothesized that incorporation of multiple ENE motifs could lead to improved PEgRNA expression and stability, as previously demonstrated for the KSHV PAN RNA and element¹⁸⁵. It is also anticipated that circularizing the PEgRNA in the form of a circular intronic RNA (ciRNA) could also lead to enhanced RNA expression and stability, as well as nuclear localization¹⁹⁴.

[0755] In various embodiments, the PEgRNA may include various above elements, as exemplified by the following sequence.

[0756] Non-limiting example 1—PEgRNA expression platform consisting of pCMV, Csy4 hairpin, the PEgRNA, and MALAT1 ENE

(SEQ ID NO: 223)
TAGTTATTAATAGTAATCAATTACGGGGTCATTAGTTCATAGCCCATAT
ATGGAGTTCCGCGTTACATAACTTACGGTAAATGGCCCGCCTGGCTGAC
CGCCCAACGACCCCCGCCCATTGACGTCAATAATGACGTATGTTCCCAT
AGTAACGCCAATAGGGACTTTCCATTGACGTCAATGGGTGGAGTATTTA
CGGTAAACTGCCCACTTGGCAGTACATCAAGTGTATCATATGCCAAGTA
CGCCCCCTATTGACGTCAATGACGGTAAATGGCCCGCCTGGCATTATGC
CCAGTACATGACCTTATGGGACTTTCCTACTTGGCAGTACATCTACGTA
TTAGTCATCGCTATTACCATGGTGATGCGGTTTTGGCAGTACATCAATG
GGCGTGGATAGCGGTTTGACTCACGGGGATTTCCAAGTCTCCACCCCAT
TGACGTCAATGGGAGTTTGTTTTGGCACCAAAATCAACGGGACTTTCCA
AAATGTCGTAACAACTCCGCCCCATTGACGCAAATGGGCGGTAGGCGTG
TACGGTGGGAGGTCTATATAAGCAGAGCTGGTTTAGTGAACCGTCAGAT
CGTTCACTGCCGTATAGGCAGGGCCCAGACTGAGCACGTGAGTTTTAGA
GCTAGAAATAGCAAGTTAAAATAAGGCTAGTCCGTTATCAACTTGAAAA
AGTGGGACCGAGTCGGTCCTCTGCCATCAAAGCGTGCTCAGTCTGTTTT
AGGGTCATGAAGGTTTTTCTTTTCCTGAGAAAACAACACGTATTGTTTT
CTCAGGTTTTGCTTTTTGGCCTTTTTCTAGCTTAAAAAAAAAAAAAGCA
AAAGATGCTGGTGGTTGGCACTCCTGGTTTCCAGGACGGGGTTCAAATC
CCTGCGGCGTCTTTGCTTTGACT

[0757] Non-limiting example 2—PEgRNA expression platform consisting of pCMV, Csy4 hairing, the

[0758] PEgRNA, and PAN ENE

(SEQ ID NO: 224)
TAGTTATTAATAGTAATCAATTACGGGGTCATTAGTTCATAGCCCATAT
ATGGAGTTCCGCGTTACATAACTTACGGTAAATGGCCCGCCTGGCTGAC
CGCCCAACGACCCCCGCCCATTGACGTCAATAATGACGTATGTTCCCAT
AGTAACGCCAATAGGGACTTTCCATTGACGTCAATGGGTGGAGTATTTA
CGGTAAACTGCCCACTTGGCAGTACATCAAGTGTATCATATGCCAAGTA
CGCCCCCTATTGACGTCAATGACGGTAAATGGCCCGCCTGGCATTATGC
CCAGTACATGACCTTATGGGACTTTCCTACTTGGCAGTACATCTACGTA
TTAGTCATCGCTATTACCATGGTGATGCGGTTTTGGCAGTACATCAATG
GGCGTGGATAGCGGTTTGACTCACGGGGATTTCCAAGTCTCCACCCCAT
TGACGTCAATGGGAGTTTGTTTTGGCACCAAAATCAACGGGACTTTCCA
AAATGTCGTAACAACTCCGCCCCATTGACGCAAATGGGCGGTAGGCGTG
TACGGTGGGAGGTCTATATAAGCAGAGCTGGTTTAGTGAACCGTCAGAT
CGTTCACTGCCGTATAGGCAGGGCCCAGACTGAGCACGTGAGTTTTAGA
GCTAGAAATAGCAAGTTAAAATAAGGCTAGTCCGTTATCAACTTGAAAA
AGTGGGACCGAGTCGGTCCTCTGCCATCAAAGCGTGCTCAGTCTGTTTT
GTTTTGGCTGGGTTTTTCCTTGTTCGCACCGGACACCTCCAGTGACCAG
ACGGCAAGGTTTTTATCCCAGTGTATATTGGAAAAACATGTTATACTTT
TGACAATTTAACGTGCCTAGAGCTCAAATTAAACTAATACCATAACGTA
ATGCAACTTACAACATAAATAAAGGTCAATGTTTAATCCATAAAAAAAA
AAAAAAAAAAA

[0759] Non-limiting example 3—PEgRNA expression platform consisting of pCMV, Csy4 hairing, the

[0760] PEgRNA, and 3xPAN ENE

(SEQ ID NO: 225)
TAGTTATTAATAGTAATCAATTACGGGGTCATTAGTTCATAGCCCATAT
ATGGAGTTCCGCGTTACATAACTTACGGTAAATGGCCCGCCTGGCTGAC
CGCCCAACGACCCCCGCCCATTGACGTCAATAATGACGTATGTTCCCAT
AGTAACGCCAATAGGGACTTTCCATTGACGTCAATGGGTGGAGTATTTA
CGGTAAACTGCCCACTTGGCAGTACATCAAGTGTATCATATGCCAAGTA
CGCCCCCTATTGACGTCAATGACGGTAAATGGCCCGCCTGGCATTATGC
CCAGTACATGACCTTATGGGACTTTCCTACTTGGCAGTACATCTACGTA
TTAGTCATCGCTATTACCATGGTGATGCGGTTTTGGCAGTACATCAATG
GGCGTGGATAGCGGTTTGACTCACGGGGATTTCCAAGTCTCCACCCCAT
TGACGTCAATGGGAGTTTGTTTTGGCACCAAAATCAACGGGACTTTCCA
AAATGTCGTAACAACTCCGCCCCATTGACGCAAATGGGCGGTAGGCGTG
TACGGTGGGAGGTCTATATAAGCAGAGCTGGTTTAGTGAACCGTCAGAT
CGTTCACTGCCGTATAGGCAGGGCCCAGACTGAGCACGTGAGTTTTAGA
GCTAGAAATAGCAAGTTAAAATAAGGCTAGTCCGTTATCAACTTGAAAA
AGTGGGACCGAGTCGGTCCTCTGCCATCAAAGCGTGCTCAGTCTGTTTT
GTTTTGGCTGGGTTTTTCCTTGTTCGCACCGGACACCTCCAGTGACCAG
ACGGCAAGGTTTTTATCCCAGTGTATATTGGAAAAACATGTTATACTTT
TGACAATTTAACGTGCCTAGAGCTCAAATTAAACTAATACCATAACGTA
ATGCAACTTACAACATAAATAAAGGTCAATGTTTAATCCATAAAAAAAA
AAAAAAAAAAAACACACTGTTTTGGCTGGGTTTTTCCTTGTTCGCACCG
GACACCTCCAGTGACCAGACGGCAAGGTTTTTATCCCAGTGTATATTGG
AAAAACATGTTATACTTTTGACAATTTAACGTGCCTAGAGCTCAAATTA
AACTAATACCATAACGTAATGCAACTTACAACATAAATAAAGGTCAATG
TTTAATCCATAAAAAAAAAAAAAAAAAAATCTCTCTGTTTTGGCTGGGT
TTTTCCTTGTTCGCACCGGACACCTCCAGTGACCAGACGGCAAGGTTTT
TATCCCAGTGTATATTGGAAAAACATGTTATACTTTTGACAATTTAACG
TGCCTAGAGCTCAAATTAAACTAATACCATAACGTAATGCAACTTACAA
CATAAATAAAGGTCAATGTTTAATCCATAAAAAAAAAAAAAAAAAAA

[0761] Non-limiting example 4—PEgRNA expression platform consisting of pCMV, Csy4 hairing, the

[0762] PEgRNA, and 3′ box

(SEQ ID NO: 226)
TAGTTATTAATAGTAATCAATTACGGGGTCATTAGTTCATAGCCCATAT
ATGGAGTTCCGCGTTACATAACTTACGGTAAATGGCCCGCCTGGCTGAC
CGCCCAACGACCCCCGCCCATTGACGTCAATAATGACGTATGTTCCCAT
AGTAACGCCAATAGGGACTTTCCATTGACGTCAATGGGTGGAGTATTTA
CGGTAAACTGCCCACTTGGCAGTACATCAAGTGTATCATATGCCAAGTA
CGCCCCCTATTGACGTCAATGACGGTAAATGGCCCGCCTGGCATTATGC
CCAGTACATGACCTTATGGGACTTTCCTACTTGGCAGTACATCTACGTA
TTAGTCATCGCTATTACCATGGTGATGCGGTTTTGGCAGTACATCAATG
GGCGTGGATAGCGGTTTGACTCACGGGGATTTCCAAGTCTCCACCCCAT
TGACGTCAATGGGAGTTTGTTTTGGCACCAAAATCAACGGGACTTTCCA
AAATGTCGTAACAACTCCGCCCCATTGACGCAAATGGGCGGTAGGCGTG
TACGGTGGGAGGTCTATATAAGCAGAGCTGGTTTAGTGAACCGTCAGAT
CGTTCACTGCCGTATAGGCAGGGCCCAGACTGAGCACGTGAGTTTTAGA
GCTAGAAATAGCAAGTTAAAATAAGGCTAGTCCGTTATCAACTTGAAAA
AGTGGGACCGAGTCGGTCCTCTGCCATCAAAGCGTGCTCAGTCTGTTTG
TTTCAAAAGTAGACTGTACGCTAAGGGTCATATCTTTTTTTGTTTGGTT
TGTGTCTTGGTTGGCGTCTTAAA

[0763] Non-limiting example 5—PEgRNA expression platform consisting of pUl, Csy4 hairping, the

[0764] PEgRNA, and 3′ box

(SEQ ID NO: 227)
CTAAGGACCAGCTTCTTTGGGAGAGAACAGACGCAGGGGCGGGAGGGAA
AAAGGGAGAGGCAGACGTCACTTCCCCTTGGCGGCTCTGGCAGCAGATT
GGTCGGTTGAGTGGCAGAAAGGCAGACGGGGACTGGGCAAGGCACTGTC
GGTGACATCACGGACAGGGCGACTTCTATGTAGATGAGGCAGCGCAGAG
GCTGCTGCTTCGCCACTTGCTGCTTCACCACGAAGGAGTTCCCGTGCCC
TGGGAGCGGGTTCAGGACCGCTGATCGGAAGTGAGAATCCCAGCTGTGT
GTCAGGGCTGGAAAGGGCTCGGGAGTGCGCGGGGCAAGTGACCGTGTGT
GTAAAGAGTGAGGCGTATGAGGCTGTGTCGGGGCAGAGGCCCAAGATCT
CAGTTCACTGCCGTATAGGCAGGGCCCAGACTGAGCACGTGAGTTTTAG
AGCTAGAAATAGCAAGTTAAAATAAGGCTAGTCCGTTATCAACTTGAAA
AAGTGGGACCGAGTCGGTCCTCTGCCATCAAAGCGTGCTCAGTCTGTTT
CAGCAAGTTCAGAGAAATCTGAACTTGCTGGATTTTTGGAGCAGGGAGA
TGGAATAGGAGCTTGCTCCGTCCACTCCACGCATCGACCTGGTATTGCA
GTACCTCCAGGAACGGTGCACCCACTTTCTGGAGTTTCAAAAGTAGACT
GTACGCTAAGGGTCATATCTTTTTTTGTTTGGTTTGTGTCTTGGTTGGC
GTCTTAAA.

[0765] In various other embodiments, the PEgRNA may be improved by introducing improvements to the scaffold or core sequences. This can be done by introducing known

[0766] The core, Cas9-binding PEgRNA scaffold can likely be improved to enhance PE activity. Several such approaches have already been demonstrated. For instance, the first pairing element of the scaffold (P1) contains a GTTTT-AAAAC (SEQ ID NO: 3939) pairing element. Such runs of Ts have been shown to result in pol III pausing and premature termination of the RNA transcript. Rational mutation of one of the T-A pairs to a G-C pair in this portion of P1 has been shown to enhance sgRNA activity, suggesting this approach would also be feasible for PEgRNAs¹⁹⁵. Additionally, increasing the length of P1 has also been shown to enhance sgRNA folding and lead to improved activity^{195,} suggesting it as another avenue for the improvement of PEgRNA activity. Example improvements to the core can include:

[0767] PEgRNA containing a 6 nt extension to P1

(SEQ ID NO: 228)
GGCCCAGACTGAGCACGTGAGTTTTAGAGCTAGCTCATGAAAATGAGCT
AGCAAGTTAAAATAAGGCTAGTCCGTTATCAACTTGAAAAAGTGGGACC
GAGTCGGTCCTCTGCCATCAAAGCGTGCTCAGTCTGTTTTTTT

[0768] PEgRNA containing a T-A to G-C mutation within P1

(SEQ ID NO: 229)
GGCCCAGACTGAGCACGTGAGTTTGAGAGCTAGAAATAGCAAGTTTAAA
TAAGGCTAGTCCGTTATCAACTTGAAAAAGTGGGACCGAGTCGGTCCTC
TGCCATCAAAGCGTGCTCAGTCTGTTTTTTT

[0769] In various other embodiments, the PEgRNA may be improved by introducing modifications to the edit template region. As the size of the insertion templated by the PEgRNA increases, it is more likely to be degraded by endonucleases, undergo spontaneous hydrolysis, or fold into secondary structures unable to be reverse-transcribed by the RT or that disrupt folding of the PEgRNA scaffold and subsequent Cas9-RT binding. Accordingly, it is likely that modification to the template of the PEgRNA might be necessary to affect large insertions, such as the insertion of whole genes. Some strategies to do so include the incorporation of modified nucleotides within a synthetic or semi-synthetic PEgRNA that render the RNA more resistant to degradation or hydrolysis or less likely to adopt inhibitory secondary structures¹⁹⁶. Such modifications could include 8-aza-7-deazaguanosine, which would reduce RNA secondary structure in G-rich sequences; locked-nucleic acids (LNA) that reduce degradation and enhance certain kinds of RNA secondary structure; 2′-O-methyl, 2′-fluoro, or 2′-O-methoxyethoxy modifications that enhance RNA stability. Such modifications could also be included elsewhere in the PEgRNA to enhance stability and activity. Alternatively or additionally, the template of the PEgRNA could be designed such that it both encodes for a desired protein product and is also more likely to adopt simple secondary structures that are able to be unfolded by the RT. Such simple structures would act as a thermodynamic sink, making it less likely that more complicated structures that would prevent reverse transcription would occur. Finally, one could also split the template into two, separate PEgRNAs. In such a design, a PE would be used to initiate transcription and also recruit a separate template RNA to the targeted site via an RNA-binding protein fused to Cas9 or an RNA recognition element on the PEgRNA itself such as the MS2 aptamer. The RT could either directly bind to this separate template RNA, or initiate reverse transcription on the original PEgRNA before swapping to the second template. Such an approach could enable long insertions by both preventing misfolding of the PEgRNA upon addition of the long template and also by not requiring dissociation of Cas9 from the genome for long insertions to occur, which could possibly be inhibiting PE-based long insertions.

[0770] In still other embodiments, the PEgRNA may be improved by introducing additional RNA motifs at the 5′ and 3′ termini of the PEgRNAs, or even at positions therein between (e.g., in the gRNA core region, or the the spacer). Several such motifs—such as the PAN ENE from KSHV and the ENE from MALAT1 were discussed above as possible means to terminate expression of longer PEgRNAs from non-pol III promoters. These elements form RNA triple helices that engulf the polyA tail, resulting in their being retained within the nucleus^{184,187} However, by forming complex structures at the 3′ terminus of the PEgRNA that occlude the terminal nucleotide, these structures would also likely help prevent exonuclease-mediated degradation of PEgRNAs.

[0771] Other structural elements inserted at the 3′ terminus could also enhance RNA stability, albeit without enabling termination from non-pol III promoters. Such motifs could include hairpins or RNA quadruplexes that would occlude the 3′ terminus¹⁹⁷, or self-cleaving ribozymes such as HDV that would result in the formation of a 2′-3′-cyclic phosphate at the 3′ terminus and also potentially render the PEgRNA less likely to be degraded by exonucleases¹⁹⁸. Inducing the PEgRNA to cyclize via incomplete splicing—to form a ciRNA—could also increase PEgRNA stability and result in the PEgRNA being retained within the nucleus¹⁹⁴.

[0772] Additional RNA motifs could also improve RT processivity or enhance PEgRNA activity by enhancing RT binding to the DNA-RNA duplex. Addition of the native sequence bound by the RT in its cognate retroviral genome could enhance RT activity¹⁹⁹. This could include the native primer binding site (PBS), polypurine tract (PPT), or kissing loops involved in retroviral genome dimerization and initiation of transcription¹⁹⁹.

[0773] Addition of dimerization motifs—such as kissing loops or a GNRA tetraloop/tetraloop receptor pair²⁰⁰—at the 5′ and 3′ termini of the PEgRNA could also result in effective circularization of the PEgRNA, improving stability. Additionally, it is envisioned that addition of these motifs could enable the physical separation of the PEgRNA spacer and primer, prevention occlusion of the spacer which would hinder PE activity. Short 5′ extensions or 3′ extensions to the PEgRNA that form a small toehold hairpin in the spacer region or along the primer binding site could also compete favorably against the annealing of intracomplementary regions along the length of the PEgRNA, e.g., the interaction between the spacer and the primer binding site that can occur. Finally, kissing loops could also be used to recruit other template RNAs to the genomic site and enable swapping of RT activity from one RNA to the other. As exemplary embodiments of various secondary structures, the PEgRNA depicted in FIG. 3D and FIG. 3E list a number secondary RNA structures that may be engineered into any region of the PEgRNA, including in the terminal portions of the extension arm (i.e., e1 and e2), as shown.

[0774] Example improvements include, but are not limited to:

PEgRNA-HDV fusion
(SEQ ID NO: 230)
GGCCCAGACTGAGCACGTGAGTTTTAGAGCTAGAAATAGCAAGTTAAAA
TAAGGCTAGTCCGTTATCAACTTGAAAAAGTGGGACCGAGTCGGTCCTC
TGCCATCAAAGCGTGCTCAGTCTGGGCCGGCATGGTCCCAGCCTCCTCG
CTGGCGCCGGCTGGGCAACATGCTTCGGCATGGCGAATGGGACTTTTTT
T
PEgRNA-MMLV kissing loop
(SEQ ID NO: 231)
GGTGGGAGACGTCCCACCGGCCCAGACTGAGCACGTGAGTTTTAGAGCT
AGAAATAGCAAGTTAAAATAAGGCTAGTCCGTTATCAACTTGAAAAAGT
GGGACCGAGTCGGTCCTCTGCCATCAAAGCTTCGACCGTGCTCAGTCTG
GTGGGAGACGTCCCACCTTTTTTT
PEgRNA-VS ribozyme kissing loop
(SEQ ID NO: 232)
GAGCAGCATGGCGTCGCTGCTCACGGCCCAGACTGAGCACGTGAGTTTT
AGAGCTAGAAATAGCAAGTTAAAATAAGGCTAGTCCGTTATCAACTTGA
AAAAGTGGGACCGAGTCGGTCCTCTGCCATCAAAGCTTCGACCGTGCTC
AGTCTCCATCAGTTGACACCCTGAGGTTTTTTT
PEgRNA-GNRA tetraloop/tetraloop receptor
(SEQ ID NO: 233)
GCAGACCTAAGTGGUGACATATGGTCTGGGCCCAGACTGAGCACGTGAG
TTTTAGAGCTAUACGTAGCAAGTTAAAATAAGGCTAGTCCGTTATCAAC
TTUACGAAGTGGGACCGAGTCGGTCCTCTGCCATCAAAGCTTCGACCGT
GCTCAGTCTGCATGCGATTAGAAATAATCGCATGTTTTTTT
PEgRNA template switching secondary RNA-HDV fusion
(SEQ ID NO: 234)
TCTGCCATCAAAGCTGCGACCGTGCTCAGTCTGGTGGGAGACGTCCCAC
CGGCCGGCATGGTCCCAGCCTCCTCGCTGGCGCCGGCTGGGCAACATGC
TTCGGCATGGCGAATGGGACTTTTTTT

[0775] PEgRNA scaffolds could be further improved via directed evolution, in an analogous fashion to how SpCas9 and prime editors (PE) have been improved. Directed evolution could enhance PEgRNA recognition by Cas9 or evolved Cas9 variants. Additionally, it is likely that different PEgRNA scaffold sequences would be optimal at different genomic loci, either enhancing PE activity at the site in question, reducing off-target activities, or both. Finally, evolution of PEgRNA scaffolds to which other RNA motifs have been added would almost certainly improve the activity of the fused PEgRNA relative to the unevolved, fusion RNA. For instance, evolution of allosteric ribozymes composed of c-di-GMP-I aptamers and hammerhead ribozymes led to dramatically improved activity²⁰², suggesting that evolution would improve the activity of hammerhead-PEgRNA fusions as well. In addition, while Cas9 currently does not generally tolerate 5′ extension of the sgRNA, directed evolution will likely generate enabling mutations that mitigate this intolerance, allowing additional RNA motifs to be utilized.

[0776] The present disclosure contemplates any such ways to further improve the efficacy of the multi-flap prime editing systems disclosed here.

[0777] In various embodiments, it may be advantageous to limit the appearance of consecutive sequence of Ts from the extension arm as consecutive series of T's may limit the capacity of the PEgRNA to be transcribed. For example, strings of at least consecutive three T's, at least consecutive four T's, at least consecutive five T's, at least consecutive six T's, at least consecutive seven T's, at least consecutive eight T's, at least consecutive nine T's, at least consecutive ten T's, at least consecutive elevent T's, at least consecutive twelve T's, at least consecutive thirteen T's , at least consecutive fourteen T's, or at least consecutive fifteen T's should be avoided when designing the PEgRNA, or should be at least removed from the final designed sequence. In one embodiment, one can avoid the includes of unwanted strings of consecutive T's in PEgRNA extension arms but avoiding target sites that are rich in consecutive A:T nucleobase pairs.

[0778] Split PEgRNA Designs for Trans Prime Editing

[0779] The instant disclosure also contemplates trans prime editing, which refers to a modified version of prime editing which operates by separating the PEgRNA into two distinct molecules: a guide RNA and a tPERT molecule. The tPERT molecule is programmed to co-localize with the prime editor complex at a target DNA site, bringing the primer binding site and the DNA synthesis template to the prime editor in trans. For example, see FIG. 3G for an embodiment of a trans prime editor (tPE) which shows a two-component system comprising (1) an recruiting protein (RP)-PE:gRNA complex and (2) a tPERT that includes a primer binding site and a DNA synthesis template joined to an RNA-protein recruitment domain (e.g., stem loop or hairpin), wherein the recruiting protein component of the RP-PE:gRNA complex recruits the tPERT to a target site to be edited, thereby associating the PBS and DNA synthesis template with the prime editor in trans. Said another way, the tPERT is engineered to contain (all or part of) the extension arm of a PEgRNA, which includes the primer binding site and the DNA synthesis template. One advantage of this approach is to separate the extension arm of a PEgRNA from the guide RNA, thereby minimizing annealing interactions that tend to occur between the PBS of the extension arm and the spacer sequence of the guide RNA.

[0780] A key feature of trans prime editing is the ability of the trans prime editor to recruit the tPERT to the site of DNA editing, thereby effectively co-localizing all of the functions of a PEgRNA at the site of prime editing. Recruitment can be achieve by installing an RNA-protein recruitment domain, such as a MS2 aptamer, into the tPERT and fusing a corresponding recruiting protein to the prime editor (e.g., via a linker to the napDNAbp or via a linker to the polymerase) that is capable of specifically binding to the RNA-protein recruitment domain, thereby recruiting the tPERT molecule to the prime editor complex. As depicted in the process described in FIG. 3H, the RP-PE:gRNA complex binds to and nicks the target DNA sequence. Then, the recruiting protein (RP) recruits a tPERT to co-localize to the prime editor complex bound to the DNA target site, thereby allowing the primer binding site, located on the tPERT, to bind to the primer sequence on the nicked strand, and subsequently, allowing the polymerase (e.g., RT) to synthesize a single strand of DNA against the DNA synthesis template, located on the tPERT, up through the 5′ end of the tPERT.

[0781] While the tPERT is shown in FIG. 3G and FIG. 3H as comprising the PBS and DNA synthesis template on the 5′ end of the RNA-protein recruitment domain, the tPERT in other configurations may be designed with the PBS and DNA synthesis template located on the 3′ end of the RNA-protein recruitment domain However, the tPERT with the 5′ extension has the advantage that synthesis of the single strand of DNA will naturally terminate at the 5′ end of the tPERT and thus, does not risk using any portion of the RNA-protein recruitment domain as a template during the DNA synthesis stage of prime editing.

[0782] PEgRNA Design Method

[0783] The present disclosure also relates to methods for designing PEgRNAs.

[0784] In one aspect of design, the design approach can take into account the particular application for which prime editing is being used. For instance, and as exemplied and discussed herein, prime editing can be used, without limitation, to (a) install mutation-correcting changes to a nucleotide sequence, (b) install protein and RNA tags, (c) install immunoepitopes on proteins of interest, (d) install inducible dimerization domains in proteins, (e) install or remove sequences to alter that activity of a biomolecule, (f) install recombinase target sites to direct specific genetic changes, and (g) mutagenesis of a target sequence by using an error-prone RT. In addition to these methods which, in general, insert, change, or delete nucleotide sequences at target sites of interest, prime editors can also be used to construct highly programmable libraries, as well as to conduct cell data recording and lineage tracing studies. In these various uses, there may be as described herein particular design aspects pertaining to the preparation of a PEgRNA that is particularly useful for any given of these applications.

[0785] When designing a PEgRNA for any particular application or use of prime editing, a number of considerations may be taken into account, which include, but are not limited to:
[0786] (a) the target sequence, i.e., the nucleotide sequence in which one or more nucleobase modifications are desired to be installed by the prime editor;
[0787] (b) the location of the cut site within the target sequence, i.e., the specific nucleobase position at which the prime editor will induce a single-stand nick to create a 3′ end RT primer sequence on one side of the nick and the 5′ end endogenous flap on the other side of the nick (which ultimately is removed by FEN1 or equivalent thereto and replaced by the 3′ ssDNA flap. The cut site is analogous to the “edit location” since this what creates the 3′ end RT primer sequence which becomes extended by the RT during RNA-depending DNA polymerization to create the 3′ ssDNA flap containing the desired edit, which then replaces the 5′ endogenous DNA flap in the target sequence.
[0788] (c) the available PAM sequences (including the canonical SpCas9 PAM sites, as well as non-canonical PAM sites recognized by Cas9 variants and equivalents with expanded or differing PAM specificities);
[0789] (d) the spacing between the available PAM sequences and the location of the cut site in the target sequence;
[0790] (e) the particular Cas9, Cas9 variant, or Cas9 equivalent of the prime editor being used;
[0791] (f) the sequence and length of the primer binding site;
[0792] (g) the sequence and length of the edit template;
[0793] (h) the sequence and length of the homology arm;
[0794] (i) the spacer sequence and length; and
[0795] (j) the core sequence.

[0796] The instant disclosure discusses these aspects above.

[0797] In one embodiment, an approach to designing a suitable PEgRNA, and optionally a nicking-sgRNA design guide for second-site nicking, is hereby provided. This embodiment provides a step-by-step set of instructions for designing PEgRNAs and nicking-sgRNAs for prime editing which takes into account one or more of the above considerations. The steps reference the examples shown in FIGS. 70A-701.
[0798] 1. Define the target sequence and the edit. Retrieve the sequence of the target DNA region (˜200bp) centered around the location of the desired edit (point mutation, insertion, deletion, or combination thereof). See FIG. 70A.
[0799] 2. Locate target PAMs. Identify PAMs in the proximity to the desired edit location. PAMs can be identified on either strand of DNA proximal to the desired edit location. While PAMs close to the edit position are preferred (i.e., wherein the nick site is less than 30 nt from the edit position, or less than 29 nt, 28 nt, 27 nt, 26 nt, 25 nt, 24 nt, 23 nt, 22 nt, 21 nt, 20 nt, 19 nt, 18 nt, 17 nt, 16 nt, 15 nt, 14 nt, 13 nt, 12 nt, 11 nt, 10 nt, 9 nt, 8 nt, 7 nt, 6 nt, 5 nt, 4 nt, 3 nt, or 2 nt from the edit position to the nick site), it is possible to install edits using protospacers and PAMs that place the nick ≥30 nt from the edit position. See FIG. 70B.
[0800] 3. Locate the nick sites. For each PAM being considered, identify the corresponding nick site and on which strand. For Sp Cas9 H840A nickase, cleavage occurs in the PAM-containing strand between the 3^{rd} and 4^{th} bases 5′ to the NGG PAM. All edited nucleotides must exist 3′ of the nick site, so appropriate PAMs must place the nick 5′ to the target edit on the PAM-containing strand.

[0801] In the example shown below, there are two possible PAMs. For simplicity, the remaining steps will demonstrate the design of a PEgRNA using PAM 1 only. See FIG. 70C.
[0802] 4. Design the spacer sequence. The protospacer of Sp Cas9 corresponds to the 20 nucleotides 5′ to the NGG PAM on the PAM-containing strand. Efficient Pol III transcription initiation requires a G to be the first transcribed nucleotide. If the first nucleotide of the protospacer is a G, the spacer sequence for the PEgRNA is simply the protospacer sequence. If the first nucleotide of the protospacer is not a G, the spacer sequence of the PEgRNA is G followed by the protospacer sequence. See FIG. 70D.
[0803] 5. Design a primer binding site (PBS). Using the starting allele sequence, identify the DNA primer on the PAM-containing strand. The 3′ end of the DNA primer is the nucleotide just upstream of the nick site (i.e. the 4^{th} base 5′ to the NGG PAM for Sp Cas9). As a general design principle for use with PE2 and PE3, a PEgRNA primer binding site (PBS) containing 12 to 13 nucleotides of complementarity to the DNA primer can be used for sequences that contain ˜40-60% GC content. For sequences with low GC content, longer (14- to 15-nt) PBSs should be tested. For sequences with higher GC content, shorter (8- to 11-nt) PB Ss should be tested. Optimal PBS sequences should be determined empirically, regardless of GC content. To design a length-p PBS sequence, take the reverse complement of the first p nucleotides 5′ of the nick site in the PAM-containing strand using the starting allele sequence. See FIG. 70E.
[0804] 6. Design an RT template (or DNA synthesis template). The RT template (or DNA synthesis template where the polymerase is not reverse transcriptase) encodes the designed edit and homology to the sequence adjacent to the edit. In one embodiment, these regions correspond to the DNA synthesis template of FIG. 3D and FIG. 3E, wherein the DNA synthesis template comprises the “edit template” and the “homology arm.” Optimal RT template lengths vary based on the target site. For short-range edits (positions +1 to +6), it is recommended to test a short (9 to 12 nt), a medium (13 to 16 nt), and a long (17 to 20 nt) RT template. For long-range edits (positions +7 and beyond), it is recommended to use RT templates that extend at least 5 nt (preferably 10 or more nt) past the position of the edit to allow for sufficient 3′ DNA flap homology. For long-range edits, several RT templates should be screened to identify functional designs. For larger insertions and deletions (≥5 nt), incorporation of greater 3′ homology (-20 nt or more) into the RT template is recommended. Editing efficiency is typically impaired when the RT template encodes the synthesis of a G as the last nucleotide in the reverse transcribed DNA product (corresponding to a C in the RT template of the PEgRNA). As many RT templates support efficient prime editing, avoidance of G as the final synthesized nucleotide is recommended when designing RT templates. To design a length-r RT template sequence, use the desired allele sequence and take the reverse complement of the first r nucleotides 3′ of the nick site in the strand that originally contained the PAM. Note that compared to SNP edits, insertion or deletion edits using RT templates of the same length will not contain identical homology. See FIG. 70F.
[0805] 7. Assemble the full PEgRNA sequence. Concatenate the PEgRNA components in the following order (5′ to 3′): spacer, scaffold, RT template and PBS. See FIG. 70G.
[0806] 8. Designing nicking-sgRNAs for PE3. Identify PAMs on the non-edited strand upstream and downstream of the edit. Optimal nicking positions are highly locus-dependent and should be determined empirically. In general, nicks placed 40 to 90 nucleotides 5′ to the position across from the PEgRNA-induced nick lead to higher editing yields and fewer indels. A nicking sgRNA has a spacer sequence that matches the 20-nt protospacer in the starting allele, with the addition of a 5′-G if the protospacer does not begin with a G. See FIG. 70H.
[0807] 9. Designing PE3b nicking-sgRNAs. If a PAM exists in the complementary strand and its corresponding protospacer overlaps with the sequence targeted for editing, this edit could be a candidate for the PE3b system. In the PE3b system, the spacer sequence of the nicking-sgRNA matches the sequence of the desired edited allele, but not the starting allele. The PE3b system operates efficiently when the edited nucleotide(s) falls within the seed region (˜10 nt adjacent to the PAM) of the nicking-sgRNA protospacer. This prevents nicking of the complementary strand until after installation of the edited strand, preventing competition between the PEgRNA and the sgRNA for binding the target DNA. PE3b also avoids the generation of simultaneous nicks on both strands, thus reducing indel formation significantly while maintaining high editing efficiency. PE3b sgRNAs should have a spacer sequence that matches the 20-nt protospacer in the desired allele, with the addition of a 5′ G if needed. See FIG. 701.

[0808] The above step-by-step process for designing a suitable PEgRNA and a second-site nicking sgRNA is not meant to be limiting in any way. The disclosure contemplates variations of the above-described step-by-step process which would be derivable therefrom by a person of ordinary skill in the art.

### [7] Applications Utilizing Multi-Flap Prime Editing

[0809] Dual-flap and quadruple-flap prime editing (i.e., multi-flap prime editing) have many potential applications, such as installing peptide tags, RNA tags, immunoepitopes, dimerization domains, and recombinase target sites. One such application of dual-flap prime editing is the installation of recombinase or integrase sequences at user-specified locations in the genome. FIG. 93 illustrates the installation of Bxb1 recombinase attB (38 bp) and attP (50 bp) sites into a targeted region of the human genome (HEK293T site 3, or HEK3) with simultaneous deletion of 90 bp of intervening sequence between the two nick sites. Various degrees of complementarity between 3′ flaps allow for successful editing, though longer sequences of complementarity produce more favorable ratios of desired edits to indels. Other dual-flap prime editing applications include endogenous tagging of genes with peptide or protein sequences, or the replacement of exons with new DNA sequences that have the potential to substitute for multiple variants for which the mutation falls within the exon sequence.

[0810] Dual-flap prime editing can be used to introduce one or two recombinase sites at targeted positions in the human genome. If single recombinase sites are inserted, these can be used as landing sites for a recombinase-mediated reaction between the genomic recombinase site and a second recombinase site within an exogenously supplied DNA, such as a plasmid. This enables the targeted integration of DNA cargo. If two recombinase sites are inserted in adjacent regions of DNA, depending on the orientation of the recombinase sites, these can be used for recombinase-mediated excision or inversion of the intervening sequence, or for recombinase-mediated cassette exchange with exogenous DNA for cargo integration. Integration of compatible recombinase sites on different chromosomes enables targeted and directional chromosomal translocation. Dual-flap prime editing can be used to efficiently introduce recombinase sites at a number of loci in the human genome (FIG. 94). Thus, the pairing of recombinase site integration by dual-flap prime editing with DNA recombinase enzymes represents a powerful approach for achieving many types of SV edits and target integration of DNA cargo.

[0811] The multi-flap prime editors (e.g., the embodiment depicted in FIG. 90) described herein may be used for the precise insertion of new DNA sequence, the precise deletion of endogenous genomic DNA sequence, or the replacement of an endogenous genomic DNA sequence with a new DNA sequence.

[0812] For example, and as exemplified and discussed herein, dual prime editing can be used to (a) install mutation-correcting changes to a nucleotide sequence, (b) install protein and RNA tags, (c) installation of immunoepitopes on proteins of interest, (d) install inducible dimerization domains in proteins, (e) install recombinase target sites to direct specific genetic changes. In addition to these methods which, in general, insert, change, or delete nucleotide sequences at target sites of interest, dual prime editors can also be used to construct highly programmable libraries, as well as to conduct cell data recording and lineage tracing studies.

[0813] These specific exemplary uses of dual prime editing are in no way intended to be limiting. The present Application contemplates any use for dual prime editing which involves, in general, some form of the installation, deletion, and/or replacement of one or more nucleobases at a target site in a nucleotide sequence, e.g., a genomic DNA.

[0814] For any of the exemplified uses for dual prime editing, one may use any prime editor disclosed herein, including PE1, PE2, PE3, and PE3b, or PE-short.

[0815] A. Prime Editing Versus Multi-Flap Prime Editing

### Classical Prime Editing

[0816] In various embodiments, prime editing (or “prime editing”) operates by contacting a target DNA molecule (for which a change in the nucleotide sequence is desired to be introduced) with a nucleic acid programmable DNA binding protein (napDNAbp) complexed with an extended guide RNA. In reference to FIG. 1G, the extended guide RNA comprises an extension at the 3′ or 5′ end of the guide RNA, or at an intramolecular location in the guide RNA and encodes the desired nucleotide change (e.g., single nucleotide change, insertion, or deletion). In step (a), the napDNAbp/extended gRNA complex contacts the DNA molecule and the extended gRNA guides the napDNAbp to bind to a target locus. In step (b), a nick in one of the strands of DNA of the target locus is introduced (e.g., by a nuclease or chemical agent), thereby creating an available 3′ end in one of the strands of the target locus. In certain embodiments, the nick is created in the strand of DNA that corresponds to the R-loop strand, i.e., the strand that is not hybridized to the guide RNA sequence, i.e., the “non-target strand.” The nick, however, could be introduced in either of the strands. That is, the nick could be introduced into the R-loop “target strand” (i.e., the strand hybridized to the protospacer sequence of the extended gRNA) or the “non-target strand” (i.e, the strand forming the single-stranded portion of the R-loop and which is complementary to the target strand). In step (c), the 3′ end of the DNA strand (formed by the nick) interacts with the extended portion of the guide RNA in order to prime reverse transcription (i.e, “target-primed RT”). In certain embodiments, the 3′ end DNA strand hybridizes to a specific RT priming sequence on the extended portion of the guide RNA, i.e, the “reverse transcriptase priming sequence.” In step (d), a reverse transcriptase is introduced (as a fusion protein with the napDNAbp or in trans) which synthesizes a single strand of DNA from the 3′ end of the primed site towards the 5′ end of the extended guide RNA. This forms a single-strand DNA flap comprising the desired nucleotide change (e.g., the single base change, insertion, or deletion, or a combination thereof) and which is otherwise homologous to the endogenous DNA at or adjacent to the nick site. In step (e), the napDNAbp and guide RNA are released. Steps (f) and (g) relate to the resolution of the single strand DNA flap such that the desired nucleotide change becomes incorporated into the target locus. This process can be driven towards the desired product formation by removing the corresponding 5′ endogenous DNA flap (e.g., by FEN1 or similar enzyme that is provide in trans, as a fusion with the prime editor, or endogenously provided) that forms once the 3′ single strand DNA flap invades and hybridizes to the endogenous DNA sequence. Without being bound by theory, the cells endogenous DNA repair and replication processes resolves the mismatched DNA to incorporate the nucleotide change(s) to form the desired altered product. The process can also be driven towards product formation with “second strand nicking,” as exemplified in FIG. 1G, or “termporal second strand nicking,” as exemplified in FIG. 1I and discussed herein.

[0817] The process of prime editing may introduce at least one or more of the following genetic changes: transversions, transitions, deletions, and insertions. In addition, prime editing may be implemented for specific applications. For example, and as exemplied and discussed herein, prime editing can be used to (a) install mutation-correcting changes to a nucleotide sequence, (b) install protein and RNA tags, (c) intallation of immunoepitopes on proteins of interest, (d) install inducible dimerization domains in proteins, (e) install or remove sequences to alter that activity of a biomolecule, (f) install recombinase target sites to direct specific genetic changes, and (g) mutagenesis of a target sequence by using an error-prone RT. In addition to these methods which, in general, insert, change, or delete nucleotide sequences at target sites of interest, prime editors can also be used to construct highly programmable libraries, as well as to conduct cell data recording and lineage tracing studies. The inventors have also contemplated additional design features of PEgRNAs that are aimed to improve the efficacy of prime editing. Still further, the inventors have conceived of methods for successfully delivering prime editors using vector delivery systems and which involve splitting the napDNAbp using intein domains.

[0818] The term “prime editing system” or “prime editor (PE)” refers the compositions involved in the method of genome editing using target-primed reverse transcription (TPRT) describe herein, including, but not limited to the napDNAbps, reverse transcriptases, fusion proteins (e.g., comprising napDNAbps and reverse transcriptases), extended guide RNAs, and complexes comprising fusion proteins and extended guide RNAs, as well as accessory elements, such as second strand nicking components and 5′ endogenous DNA flap removal endonucleases (e.g., FEN1) for helping to drive the prime editing process towards the edited product formation.

[0819] In another embodiment, the schematic of FIG. 3F depicts the interaction of a typical PEgRNA with a target site of a double stranded DNA and the concomitant production of a 3′ single stranded DNA flap containing the genetic change of interest. The double strand DNA is shown with the top strand in the 3′ to 5′ orientation and the lower strand in the 5′ to 3′ direction. The top strand comprises the “protospacer” and the PAM sequence and is referred to as the “target strand.” The complementary lower strand is referred to as the “non-target strand.” Although not shown, the PEgRNA depicted would be complexed with a Cas9 or equivalent. As shown in the schematic, the spacer of the PEgRNA anneals to a complementary region on the target strand, which is referred to as the protospacer, which is located just downstream of the PAM sequence is approximately 20 nucleotides in length. This interaction forms as DNA/RNA hybrid between the spacer RNA and the protospacer DNA, and induces the formation of an R loop in the region opposite the protospacer. As taught elsewhere herein, the Cas9 protein (not shown) then induces a nick in the non-target strand, as shown. This then leads to the formation of the 3′ ssDNA flap region which, in accordance with *z*, interacts with the 3′ end of the PEgRNA at the primer binding site. The 3′ end of the ssDNA flap (i.e., the reverse transcriptase primer sequence) anneals to the primer binding site (A) on the PEgRNA, thereby priming reverse transcriptase. Next, reverse transcriptase (e.g., provided in trans or provided cis as a fusion protein, attached to the Cas9 construct) then polymerizes a single strand of DNA which is coded for by the edit template (B) and homology arm (C). The polymerization continues towards the 5′ end of the extension arm. The polymerized strand of ssDNA forms a ssDNA 3′ end flap which, as describe elsewhere (e.g., as shown in FIG. 1G), invades the endogenous DNA, displacing the corresponding endogenous strand (which is removed as a 5′ DNA flap of endogenous DNA), and installing the desired nucleotide edit (single nucleotide base pair change, deletions, insertions (including whole genes) through naturally occurring DNA repair/replication rounds.

[0820] This application of prime editing can be further described in Example 1.

### Dual Prime Editing

[0821] This Specification describes a dual prime editing system (or a dual-flap prime editing system) that addresses the challenges associated with flap equilibration and subsequent incorporation of the edit into the non-edited complementary genomic DNA strand by simultaneously editing both DNA strands. In the dual-flap prime editing system, two pegRNAs are used to target opposite strands of a genomic site and direct the synthesis of two complementary 3′ flaps containing edited DNA sequence (FIG. 91). Unlike classical prime editing, there is no requirement for the pair of edited DNA strands (3′ flaps) to directly compete with 5′ flaps in endogenous genomic DNA, as the complementary edited strand is available for hybridization instead. Since both strands of the duplex are synthesized as edited DNA, the dual-flap prime editing system obviates the need for the replacement of the non-edited complementary DNA strand required by classical prime editing. Instead, cellular DNA repair machinery need only excise the paired 5′ flaps (original genomic DNA) and ligate the paired 3′ flaps (edited DNA) into the locus. Therefore, there is also no need to include sequences homologous to genomic DNA in the newly synthesized DNA strands, allowing selective hybridization of the new strands and facilitating edits that contain minimal genomic homology. Nuclease-active versions of prime editors that cut both strands of DNA could also be used to accelerate the removal of the original DNA sequence. Accordingly, in certain embodiments, a dual flap prime editing system involves a pair of newly synthesized DNA strands (e.g. 3′ flaps) that share homology with the endogeneous DNA sequence at a target site to be edited. In some embodiments, a dual flap prime editing system involves a pair of newly synthesized DNA strands, where at least one of the newly synthesized DNA strands does not share homology with the endogeneous DNA sequence at the target site to be edited. In some embodiments, one of the newly synthesized DNA strands comprises homology with the endogenous DNA sequence at the target site and not with the other newly synthesized DNA strand. In some embodiments, each of the the newly synthesized DNA strands comprises homology with the endogenous DNA sequence at the target site and not with the other newly synthesized DNA strand. For example, a newly synthesized 3′ flap encoded by one of the dual-flap pegRNAs may comprise a region of complementarity to a protospacer sequence of the other dual-flap pegRNA. Accordingly, in some embodiments, a pair of dual-flap pegRNAs each having complementarity to a spacer sequence of the other pegRNA may result in deletion of the endogenous DNA sequence positioned between protospacer sequences of the pair of dual-flap pegRNAs. In some embodiments, a dual flap prime editing system involves a pair of newly synthesized DNA strands, where neither of the newly synthesized DNA strands share homology with the endogeneous DNA sequence at the target site to be edited. Rather, the two newly synthesized DNA strands (e.g. 3′ flaps) each comprises a region of complementarity to each other and may form a duplex by the complementarity. A desired edited portion as compared to the endogeneous DNA sequence target site to be edited in the duplex may then be incorporated at the target site. Like classical prime editing, dual prime editing is a versatile and precise genome editing method that directly writes new genetic information into a specified DNA site using a nucleic acid programmable DNA binding protein (“napDNAbp”) working in association with a polymerase (i.e., in the form of a fusion protein or otherwise provided in trans with the napDNAbp), wherein the prime editing system is programmed with a prime editing (PE) guide RNA (“PEgRNA”) that both specifies the target site and templates the synthesis of the desired edit in the form of a replacement DNA strand by way of an extension (either DNA or RNA) engineered onto a guide RNA (e.g., at the 5′ or 3′ end, or at an internal portion of a guide RNA). The replacement strand containing the desired edit (e.g., a single nucleobase substitution) shares the same sequence as the endogenous strand of the target site to be edited (with the exception that it includes the desired edit). Through DNA repair and/or replication machinery, the endogenous strand of the target site is replaced by the newly synthesized replacement strand containing the desired edit. In some cases, prime editing may be thought of as a “search-and-replace” genome editing technology since the prime editors, as described herein, not only search and locate the desired target site to be edited, but at the same time, encode a replacement strand containing a desired edit which is installed in place of the corresponding target site endogenous DNA strand.

### B. Use of Dual Prime Editing for Peptide Tagging

[0822] In another aspect, the disclosure provides a method of using the herein described dual prime editors for genetically grafting one or more peptide tags onto a protein using prime editing (such as the embodiment shown in FIG. 90). More in particular, the disclosure provides a method for genetically installing one or more peptide tags onto a protein comprising: contacting a target nucleotide sequence encoding the protein with a prime editor configured to insert therein a second nucleotide sequence encoding the one or more peptide tags to result in a recombinant nucleotide sequence that encodes a fusion protein comprising the protein fused to the protein tag.

[0823] In other embodiments, the disclosure provides a method for making a fusion protein comprising a peptide of interest and one or more peptide tags, the method comprising: contacting a target nucleotide sequence encoding the protein with a prime editor configured to insert therein a second nucleotide sequence encoding the one or more peptide tags to result in a recombinant nucleotide sequence that encodes the fusion protein comprising the protein fused to the protein tag.

[0824] In various embodiments, the target nucleotide sequence is a specific gene of interest in a genomic DNA. The gene of interest may encode a protein of interest (e.g., a receptor, an enzyme, a therapeutic protein, a membrane protein, a transport protein, a signal transduction protein, or an immunological protein, etc.). The gene of interest may also encode an RNA molecule, including, but not limited to, messenger RNA (mRNA), transfer RNA (tRNA), ribosomal RNA (rRNA), small nuclear RNA (snRNA), antisense RNA, guide RNA, microRNA (miRNA), small interfering RNA (siRNA), and cell-free RNA (cfRNA).

[0825] The peptide tag may be any peptide tag or variant thereof which imparts one or more functions onto a protein for purposes such as separation, purification, visualization, solubilization, or detection. The peptides tags can include “affinity tags” (to facilitate protein purification), “solubilization tags” (to assist in proper folding of proteins), “chromatography tags” (to alter chromatographic properties of proteins), “epitope tags” (to bind to high affinity antibodies), and “fluorescence tags” (to facilitate visualization of proteins in a cell or in vitro). Examples of peptide tags include, but are not limited to the following tags:

| NAME | AMINO ACID SEQUENCE | SEQ ID NO: |
|---|---|---|
| AVITAG™ | GLNDIFEAQKIEWHE | SEQ ID NO: 245 |
| C-TAG | EPEA | SEQ ID NO: 246 |
| CALMODULIN- | KRRWKKNFIAVSAAN | SEQ ID NO: 247 |
| TAG | RFKKISSSGAL | |
| POLYGLUTAMATE | EEEEEE | SEQ ID NO: 248 |
| TAG | | |
| E-TAG | GAPVPYPDPLEPR | SEQ ID NO: 249 |
| FLAG-TAG | DYKDDDDK | SEQ ID NO: 250 |
| HA-TAG | YPYDVPDYA | SEQ ID NO: 251 |
| HIS-TAG | H (HIS₁) | SEQ ID NO: 252 |
| | HH (HIS₂) | SEQ ID NO: 253 |
| | HHH (HIS₃) | SEQ ID NO: 254 |
| | HHHH (HIS₄) | SEQ ID NO: 255 |
| | HHHHH (HIS₅) | SEQ ID NO: 256 |
| | HHHHHH (HIS₆) | SEQ ID NO: 257 |
| | HHHHHHH (HIS₇) | SEQ ID NO: 258 |
| | HHHHHHHH (HIS₈) | SEQ ID NO: 259 |
| | HHHHHHHHH (HIS₉) | SEQ ID NO: 260 |
| | HHHHHHHHHH (HIS₁₀) | SEQ ID NO: 261 |
| | HHHHHHHHHH . . . | SEQ ID NO: 262 |
| | H . . .(HIS_{N}, | |
| | WHEREIN N = 1-25) | |
| MYC-TAG | EQKLISEEDL | SEQ ID NO: 263 |
| NE-TAG | TKENPRSNQEESYDDNES | SEQ ID NO: 264 |
| RHO1D4-TAG | TETSQVAPA | SEQ ID NO: 265 |
| S-TAG | KETAAAKFERQHMDS | SEQ ID NO: 266 |
| SBP-TAG | MDEKTTGWRGGHVVEGLAG | SEQ ID NO: 267 |
| | ELEQLRARLEHHPQGQREP | |
| SOFTAG-1 | SLAELLNAGLGGS | SEQ ID NO: 268 |
| SOFTAG-2 | TQDPSRVG | SEQ ID NO: 269 |
| SPOT-TAG | PDRVRAVSHWSS | SEQ ID NO: 270 |
| STREP-TAG | WSHPQFEK | SEQ ID NO: 271 |
| TC TAG | CCPGCC | SEQ ID NO: 272 |
| TY TAG | EVHTNQDPLD | SEQ ID NO: 273 |
| V5 TAG | GKPIPNPLLGLDST | SEQ ID NO: 274 |
| VSV-TAG | YTDIEMNRLGK | SEQ ID NO: 275 |
| XPRESS TAG | DLYDDDDK | SEQ ID NO: 276 |

[0826] Peptide tags may also be the following affinity tags (for separation and/or purification of proteins) (as described in Table 9.9.1 of Kimple et al., “Overview of Affinity Tags for Protein Purification,” Curr Protoc Protein Sci, 2013, 73:Unit-9.9, which is incorporated herein by reference).

| | AMINO ACID | |
|---|---|---|
| NAME | SEQUENCE | |
| AU1 EPITOPE | DTYRYI | SEQ ID NO: 278 |
| AU5 EPITOPE | TDFYLK | SEQ ID NO: 279 |
| BACTERIOPHAGE T7 | MASMTGGQQMG | SEQ ID NO: 280 |
| EPITOPE (T7-TAG) | | |
| BLUETONGUE VIRUS | QYPALT | SEQ ID NO: 281 |
| TAG (B-TAG) | | |
| E2 EPITOPE | SSTSSDFRDR | SEQ ID NO: 282 |
| HISTIDINE AFFINITY | KDHLIHNVHK | SEQ ID NO: 283 |
| TAG (HAT) | EFHAHAHNK | |
| HSV EPITOPE | QPELAPED | SEQ ID NO: 284 |
| POLYARGININE | RRRRR | SEQ ID NO: 285 |
| (ARG-TAG) | | |
| POLYASPARTATE | CCCC | SEQ ID NO: 286 |
| (ASP-TAG) | | |
| POLYPHENYLALANINE | FFFFFFFFFFF | SEQ ID NO: 287 |
| (PHE-TAG) | | |
| S1-TAG | NANNPDWDF | SEQ ID NO: 288 |
| S-TAG | KETAAAKFE | SEQ ID NO: 289 |
| | RQHMDS | |
| VSV-G | YTDIEMNRLGK | SEQ ID NO: 290 |

[0827] In particular embodiments, the peptide tags may include a His⁶ tag, FLAG-tag, V5-tag, GCN4-tag, HA-tag, Myc-Tag, FIAsH/ReAsH-tag, Sortase substrate, pi-clamp.

[0828] In various embodiments, the peptide tags may be used for applications that include protein fluorescent labeling, immunoprecipitation, immunoblotting, immunohistochemistry, protein recruitment, inducible protein degrons, and genome-wide screening.

[0829] In various other embodiments, the peptide tag may include an intein sequence to install protein self-splicing function. As used herein, the term “intein” refers to auto-processing polypeptide domains found in organisms from all domains of life. An intein (intervening protein) carries out a unique auto-processing event known as protein splicing in which it excises itself out from a larger precursor polypeptide through the cleavage of two peptide bonds and, in the process, ligates the flanking extein (external protein) sequences through the formation of a new peptide bond. This rearrangement occurs post-translationally (or possibly co-translationally), as intein genes are found embedded in frame within other protein-coding genes. Furthermore, intein-mediated protein splicing is spontaneous; it requires no external factor or energy source, only the folding of the intein domain. This process is also known as cis-protein splicing, as opposed to the natural process of trans-protein splicing with “split inteins.” Inteins are the protein equivalent of the self-splicing RNA introns (see Perler et al., Nucleic Acids Res. 22:1125-1127 (1994)), which catalyze their own excision from a precursor protein with the concomitant fusion of the flanking protein sequences, known as exteins (reviewed in Perler et al., Curr. Opin. Chem. Biol. 1:292-299 (1997); Perler, F. B. Cell 92(1):1-4 (1998); Xu et al., EMBO J. 15(19):5146-5153 (1996)).

[0830] The mechanism of the protein splicing process has been studied in great detail (Chong, et al., J. Biol. Chem. 1996, 271, 22159-22168; Xu, M-Q & Perler, F. B. EMBO Journal, 1996, 15, 5146-5153) and conserved amino acids have been found at the intein and extein splicing points (Xu, et al., EMBO Journal, 1994, 13 5517-522).

[0831] Inteins can also exist as two fragments encoded by two separately transcribed and translated genes. These so-called split inteins self-associate and catalyze protein-splicing activity in trans. Split inteins have been identified in diverse cyanobacteria and archaea (Caspi et al, Mol Microbiol. 50: 1569-1577 (2003); Choi J. et al, J Mol Biol. 556: 1093-1106 (2006.); Dassa B. et al, Biochemistry. 46:322-330 (2007.); Liu X. and Yang J., J Biol Chem. 275:26315-26318 (2003); Wu H. et al. Proc Natl Acad Sci USA. £5:9226-9231 (1998.); and Zettler J. et al, FEBS Letters. 553:909-914 (2009)), but have not been found in eukaryotes thus far. Recently, a bioinformatic analysis of environmental metagenomic data revealed 26 different loci with a novel genomic arrangement. At each locus, a conserved enzyme coding region is interrupted by a split intein, with a freestanding endonuclease gene inserted between the sections coding for intein subdomains. Among them, five loci were completely assembled: DNA helicases (gp41-1, gp41-8); Inosine-5′-monophosphate dehydrogenase (IMPDH-1); and Ribonucleotide reductase catalytic subunits (NrdA-2 and NrdJ-1). This fractured gene organization appears to be present mainly in phages (Dassa et al, Nucleic Acids Research. 57:2560-2573 (2009)).

[0832] In certain embodiments, the prime editors described herein can be used to insert split-intein tags in two different proteins, causing their intracellular ligation when co-expressed to form a fusion protein. In protein trans-splicing, one precursor protein consists of an N-extein part followed by the N-intein, another precursor protein consists of the C-intein followed by a C-extein part, and a trans-splicing reaction (catalyzed by the N- and C-inteins together) excises the two intein sequences and links the two extein sequences with a peptide bond. Protein trans-splicing, being an enzymatic reaction, can work with very low (e.g., micromolar) concentrations of proteins and can be carried out under physiological conditions.

[0833] The split intein Npu DnaE was characterized as having the highest rate reported for the protein trans-splicing reaction. In addition, the Npu DnaE protein splicing reaction is considered robust and high-yielding with respect to different extein sequences, temperatures from 6 to 37° C., and the presence of up to 6M Urea (Zettler J. et al, FEBS Letters. 553:909-914 (2009); Iwai I. et al, FEBS Letters 550: 1853-1858 (2006)). As expected, when the Cysl Ala mutation at the N-domain of these inteins was introduced, the initial N to S-acyl shift and therefore protein splicing was blocked. Unfortunately, the C-terminal cleavage reaction was also almost completely inhibited. The dependence of the asparagine cyclization at the C-terminal splice junction on the acyl shift at the N-terminal scissile peptide bond seems to be a unique property common to the naturally split DnaE intein alleles (Zettler J. et al. FEBS Letters. 555:909-914 (2009)).

[0834] Protein trans-splicing, catalyzed by split inteins, provides an entirely enzymatic method for protein ligation. A split-intein is essentially a contiguous intein (e g a mini-intein) split into two pieces named N-intein and C-intein, respectively. The N-intein and C-intein of a split intein can associate non-covalently to form an active intein and catalyze the splicing reaction essentially in same way as a contiguous intein does. Split inteins have been found in nature and also engineered in laboratories. As used herein, the term “split intein” refers to any intein in which one or more peptide bond breaks exists between the N-terminal and C-terminal amino acid sequences such that the N-terminal and C-terminal sequences become separate molecules that can non-covalently reassociate, or reconstitute, into an intein that is functional for trans-splicing reactions. Any catalytically active intein, or fragment thereof, may be used to derive a split intein for use in the methods of the invention. For example, in one aspect the split intein may be derived from a eukaryotic intein. In another aspect, the split intein may be derived from a bacterial intein. In another aspect, the split intein may be derived from an archaeal intein. Preferably, the split intein so-derived will possess only the amino acid sequences essential for catalyzing trans-splicing reactions.

[0835] Split inteins may be created from contiguous inteins by engineering one or more split sites in the unstructured loop or intervening amino acid sequence between the −12 conserved beta-strands found in the structure of mini-inteins. Some flexibility in the position of the split site within regions between the beta-strands may exist, provided that creation of the split will not disrupt the structure of the intein, the structured beta-strands in particular, to a sufficient degree that protein splicing activity is lost.

[0836] The prime editors described herein may incorporate peptide tags (including inteins) into the C-terminal end of a protein of interest. In other embodiments, the peptide tags (including inteins) may be incorporated into the N-terminal end of a protein of interest. The peptide tags may also be incorporated into the interior of a protein of interest. The resulting fusion proteins created by the herein described prime editors may have the following structures:

[0837] [protein of interest]—[peptide tag];

[0838] [peptide tag]—[protein of interest]; or

[0839] [protein of interest—N-terminal region]—[peptide tag]—[protein of interest—C-terminal region].

[0840] The principles of guide RNA design for use in peptide tagging throughout may be applied to peptide tagging. For example, in one embodiment, the PEgRNA structure for peptide tagging may have the following structure: 5′-[spacer sequence]-[gRNA core or scaffold]-[extension arm]-3′, wherein the extension arm comprises in the 5′ to 3′ direction, a homology arm, edit template (comprising the sequence that encodes the peptide tag), and a primer binding site. This configuration is depicted in FIG. 3D and in FIG. 24.

[0841] In another embodiment, the PEgRNA structure for peptide tagging may have the following structure: 5′-[extension arm]-[spacer sequence]-[gRNA core or scaffold]-3′, wherein the extension arm comprises in the 5′ to 3′ direction, a homology arm, edit template (comprising the sequence that encodes the peptide tag), and a primer binding site. This configuration is depicted in FIG. 3E.

[0842] Embodiments of peptide tagging using prime editing is depicted in FIGS. 25 and 26 and described in Example 4.

[0843] C. Use of Dual Prime Editing for RNA Tagging

[0844] Dual prime editing may also be used to manipulate, alter, and otherwise modify the sequences of DNA encoding RNA functions through RNA tagging, and in this way provides a means to indirectly modify the structure and function of RNA. For example, dual PE can be used to insert motifs that are functional at the RNA level (hereafter RNA motifs) to tag or otherwise manipulate non-coding RNAs or mRNAs. These motifs could serve to increase gene expression, decrease gene expression, alter splicing, change post-transcriptional modification, affect the sub-cellular location of the RNA, enable isolation or determination of the intra- or extra-cellular location of the RNA (using, for instance, fluorescent RNA aptamers such as Spinach, Spinach2, Baby Spinach, or Broccoli), recruit endogenous or exogenous protein or RNA binders, introduce sgRNAs, or induce processing of the RNA, by either self-cleavage or RNAses (see FIG. 28B and Example 6 for further details).

[0845] The following RNA tags or motifs may be inserted into a gene of interest using dual prime editing (e.g., with the dual PE methodology of FIG. 90) with an appropriate PEgRNA (designed using the guidance provided herein) to affect various properties of RNA, including RNA transport, expression level, splicing, and detection.

| | | | EXEMPLARY PEGRNA |
|---|---|---|---|
| | | | FOR PRIME EDITING |
| | | | INSERTION OF RNA |
| | | | MOTIF INTO THE |
| | | FUNCTION/ | EXEMPLARY HEXA |
| RNA MOTIF | SEQUENCE OF RNA MOTIF | EFFECT | GENE* |
| POLYOMAVIRUS | AACTTGTTTATTGCAGCTTAT | TERMINATION | ATCCTTCCAGTCAGG |
| SIMIAN | AATGGTTACAAATAAAGCAA | OF | GCCATGTTTGAGAGC |
| VIRUS 40 | TAGCATCACAAATTTCACAA | TRANSCRIPTION | TAGAAATAGCAAGTT |
| (SV40) TYPE1 | ATAAAGCATTTTTTTCACTGC | OF THE | TAAATAAGGCTAGTC |
| | ATTCTAGTTGTGGTTTGTCCA | TAGGED | CGTTATCAACTTGAA |
| | AACTCATCAATGTATCTTA | GENE; | AAAGTGGGACCGAG |
| | (SEQ ID NO: 331) | TRANSPORT | TCGGTCCACCTGAACC |
| | | OF MRNA INTO | GTATATCTAAGATACA |
| | | CYTOSOL; | TTGATGAGTTTGGA |
| | | INCREASED | CAAACCACAACTAG |
| | | RNA | AATGCAGTGAAAAA |
| | | STABILITY | AATGCTTTATTTGTG |
| | | AND | AAATTTGTGATGCTA |
| | | EXPRESSION | TTGCTTTATTTGTAA |
| | | OF ENCODED | CCATTATAAGCTGCA |
| | | PROTEIN | ATAAACAAGTTCTAT |
| | | | GGCCCTGACTGGAA |
| | | | (SEQ ID NO: 332) |
| POLYOMAVIRUS | CCATGGCCCAACTTGTTTATT | TERMINATION | ATCCTTCCAGTCAGG |
| SIMIAN | GCAGCTTATAATGGTTACAA | OF | GCCATGTTTGAGAGC |
| VIRUS 40 | ATAAAGCAATAGCATCACAA | TRANSCRIPTION | TAGAAATAGCAAGTT |
| (SV40) TYPE2 | ATTTCACAAATAAAGCATTTT | OF THE | TAAATAAGGCTAGTC |
| | TTTCACTGCATTCTAGTTGTG | TAGGED | CGTTATCAACTTGAA |
| | GTTTGTCCAAACTCATCAAT | GENE; | AAAGTGGGACCGAG |
| | GTATCTTATCATGTCTGGATC | TRANSPORT | TCGGTCCACCTGAACC |
| | TC (SEQ ID NO: 333) | OF MRNA INTO | GTATATCGAGATCCA |
| | | CYTOSOL; | GACATGATAAGATAC |
| | | INCREASED | ATTGATGAGTTTGG |
| | | RNA | ACAAACCACAACTA |
| | | STABILITY | GAATGCAGTGAAAA |
| | | AND | AAATGCTTTATTTGT |
| | | EXPRESSION | GAAATTTGTGATGC |
| | | OF ENCODED | TATTGCTTTATTTGT |
| | | PROTEIN | AACCATTATAAGCTG |
| | | | CAATAAACAAGTTG |
| | | | GGCCATGGCTATGGC |
| | | | CCTGACTGGAA |
| | | | (SEQ ID NO: 334) |
| POLYOMAVIRUS | TGATCATAATCAAGCCATATC | TERMINATION | ATCCTTCCAGTCAGG |
| SIMIAN | ACATCTGTAGAGGTTTACTT | OF | GCCATGTTTGAGAGC |
| VIRUS 40 | GCTTTAAAAAACCTCCACAC | TRANSCRIPTION | TAGAAATAGCAAGTT |
| (SV40) TYPE3 | CTCCCCCTGAACCTGAAACA | OF THE | TAAATAAGGCTAGTC |
| | TAAAATGAATGCAATTGTTG | TAGGED | CGTTATCAACTTGAA |
| | TTGTTAACTTGTTTATTGCAG | GENE; | AAAGTGGGACCGAG |
| | CTTATAATGGTTACAAATAAA | TRANSPORT | TCGGTCCACCTGAACC |
| | GCAATAGCATCACAAATTTC | OF MRNA INTO | GTATATCGCAGATCC |
| | ACAAATAAAGCATTTTTTTC | CYTOSOL; | AGACATGATAAGATA |
| | ACTGCATTCTAGTTGTGGTTT | INCREASED | CATTGATGAGTTTG |
| | GTCCAAACTCATCAATGTAT | RNA | GACAAACCACAACT |
| | CTTATCATGTCTGGATCTGC | STABILITY | AGAATGCAGTGAAA |
| | (SEQ ID NO: 335) | AND | AAAATGCTTTATTTG |
| | | EXPRESSION | TGAAATTTGTGATG |
| | | OF ENCODED | CTATTGCTTTATTTG |
| | | PROTEIN | TAACCATTATAAGCT |
| | | | GCAATAAACAAGTT |
| | | | AACAACAACAATTG |
| | | | CATTCATTTTATGTT |
| | | | TCAGGTTCAGGGGG |
| | | | AGGTGTGGAGGTTT |
| | | | TTTAAAGCAAGTAA |
| | | | ACCTCTACAGATGT |
| | | | GATATGGCTTGATTA |
| | | | TGATCACTATGGCCC |
| | | | TGACTGGAA |
| | | | (SEQ ID NO: 336) |
| HUMAN | ACGGGTGGCATCCCTGTGAC | TRANSPORT | ATCCTTCCAGTCAGG |
| GROWTH | CCCTCCCCAGTGCCTCTCCT | OF RNA INTO | GCCATGTTTGAGAGC |
| HORMONE | GGCCCTGGAAGTTGCCACTC | CYTOPLASM; | TAGAAATAGCAAGTT |
| (HGH) | CAGTGCCCACCAGCCTTGTC | ENHANCED | TAAATAAGGCTAGTC |
| | CTAATAAAATTAAGTTGCATC | RNA | CGTTATCAACTTGAA |
| | ATTTTGTCTGACTAGGTGTC | STABILITY | AAAGTGGGACCGAG |
| | CTTCTATAATATTATGGGGTG | AND | TCGGTCCACCTGAACC |
| | GAGGGGGGTGGTATGGAGC | EXPRESSION | GTATATCAAGGACAG |
| | AAGGGGCAAGTTGGGAAGA | OF ENCODED | GGAAGGGAGCAGT |
| | CAACCTGTAGGGCCTGCGGG | PROTEIN | GGTTCACGCCTGTA |
| | GTCTATTGGGAACCAAGCTG | | ATCCCAGCAATTTG |
| | GAGTGCAGTGGCACAATCTT | | GGAGGCCAAGGTG |
| | GGCTCACTGCAATCTCCGCC | | GGTAGATCACCTGA |
| | TCCTGGGTTCAAGCGATTCT | | GATTAGGAGTTGGA |
| | CCTGCCTCAGCCTCCCGAGT | | GACCAGCCTGGCCA |
| | TGTTGGGATTCCAGGCATGC | | ATATGGTGAAACCC |
| | ATGACCAGGCTCAGCTAATT | | CGTCTCTACCAAAA |
| | TTTGTTTTTTTGGTAGAGAC | | AAACAAAAATTAGC |
| | GGGGTTTCACCATATTGGCC | | TGAGCCTGGTCATG |
| | AGGCTGGTCTCCAACTCCTA | | CATGCCTGGAATCC |
| | ATCTCAGGTGATCTACCCAC | | CAACAACTCGGGAG |
| | CTTGGCCTCCCAAATTGCTG | | GCTGAGGCAGGAGA |
| | GGATTACAGGCGTGAACCAC | | ATCGCTTGAACCCA |
| | TGCTCCCTTCCCTGTCCTT | | GGAGGCGGAGATTG |
| | (SEQ ID NO: 337) | | CAGTGAGCCAAGAT |
| | | | TGTGCCACTGCACT |
| | | | CCAGCTTGGTTCCC |
| | | | AATAGACCCCGCAG |
| | | | GCCCTACAGGTTGT |
| | | | CTTCCCAACTTGCC |
| | | | CCTTGCTCCATACC |
| | | | ACCCCCCTCCACCC |
| | | | CATAATATTATAGAA |
| | | | GGACACCTAGTCAG |
| | | | ACAAAATGATGCAA |
| | | | CTTAATTTTATTAGG |
| | | | ACAAGGCTGGTGGG |
| | | | CACTGGAGTGGCAA |
| | | | CTTCCAGGGCCAGG |
| | | | AGAGGCACTGGGGA |
| | | | GGGGTCACAGGGAT |
| | | | GCCACCCGTCTATGG |
| | | | CCCTGACTGGAA |
| | | | (SEQ ID NO: 338) |
| BOVINE | CGACTGTGCCTTCTAGTTGC | TRANSPORT | ATCCTTCCAGTCAGG |
| GROWTH | CAGCCATCTGTTGTTTGCCC | OF RNA INTO | GCCATGTTTGAGAGC |
| HORMONE | CTCCCCCGTGCCTTCCTTGA | CYTOPLASM; | TAGAAATAGCAAGTT |
| (BGH) | CCCTGGAAGGTGCCACTCCC | ENHANCED | TAAATAAGGCTAGTC |
| | ACTGTCCTTTCCTAATAAAAT | RNA | CGTTATCAACTTGAA |
| | GAGGAAATTGCATCGCATTG | STABILITY | AAAGTGGGACCGAG |
| | TCTGAGTAGGTGTCATTCTAT | AND | TCGGTCCACCTGAACC |
| | TCTGGGGGGTGGGGTGGGG | EXPRESSION | GTATATCCCATAGAGC |
| | CAGGACAGCAAGGGGGAGG | OF ENCODED | CCACCGCATCCCCA |
| | ATTGGGAAGACAATAGCAGG | PROTEIN | GCATGCCTGCTATT |
| | CATGCTGGGGATGCGGTGGG | | GTCTTCCCAATCCT |
| | CTCTATGG (SEQ ID NO: 339) | | CCCCCTTGCTGTCC |
| | | | TGCCCCACCCCACC |
| | | | CCCCAGAATAGAAT |
| | | | GACACCTACTCAGA |
| | | | CAATGCGATGCAAT |
| | | | TTCCTCATTTTATTA |
| | | | GGAAAGGACAGTGG |
| | | | GAGTGGCACCTTCC |
| | | | AGGGTCAAGGAAGG |
| | | | CACGGGGGAGGGG |
| | | | CAAACAACAGATGG |
| | | | CTGGCAACTAGAAG |
| | | | GCACAGTCGCTATG |
| | | | GCCCTGACTGGAA |
| | | | (SEQ ID NO: 340) |
| RABBIT BETA- | TTCACTCCTCAGGTGCAGGC | TRANSPORT | ATCCTTCCAGTCAGG |
| GLOBIN | TGCCTATCAGAAGGTGGTGG | OF RNA INTO | GCCATGTTTGAGAGC |
| (RBGLOB) | CTGGTGTGGCCAATGCCCTG | CYTOPLASM; | TAGAAATAGCAAGTT |
| | GCTCACAAATACCACTGAGA | ENHANCED | TAAATAAGGCTAGTC |
| | TCTTTTTCCCTCTGCCAAAA | RNA | CGTTATCAACTTGAA |
| | ATTATGGGGACATCATGAAG | STABILITY | AAAGTGGGACCGAG |
| | CCCCTTGAGCATCTGACTTC | AND | TCGGTCCACCTGAACC |
| | TGGCTAATAAAGGAAATTTA | EXPRESSION | GTATATCGATCTCCAT |
| | TTTTCATTGCAATAGTGTGTT | OF ENCODED | AAGAGAAGAGGGAC |
| | GGAATTTTTTGTGTCTCTCAC | PROTEIN | AGCTATGACTGGGA |
| | TCGGAAGGACATATGGGAGG | | GTAGTCAGGAGAGG |
| | GCAAATCATTTAAAACATCA | | AGGAAAAATCTGGC |
| | GAATGAGTATTTGGTTTAGA | | TAGTAAAACATGTAA |
| | GTTTGGCAACATATGCCCATA | | GGAAAATTTTAGGG |
| | TGCTGGCTGCCATGAACAAA | | ATGTTAAAGAAAAA |
| | GGTTGGCTATAAAGAGGTCA | | AATAACACAAAACA |
| | TCAGTATATGAAACAGCCCC | | AAATATAAAAAAAAT |
| | CTGCTGTCCATTCCTTATTCC | | CTAACCTCAAGTCA |
| | ATAGAAAAGCCTTGACTTGA | | AGGCTTTTCTATGG |
| | GGTTAGATTTTTTTTATATTTT | | AATAAGGAATGGAC |
| | GTTTTGTGTTATTTTTTTCTT | | AGCAGGGGGCTGTT |
| | TAACATCCCTAAAATTTTCCT | | TCATATACTGATGAC |
| | TACATGTTTTACTAGCCAGAT | | CTCTTTATAGCCAAC |
| | TTTTCCTCCTCTCCTGACTAC | | CTTTGTTCATGGCA |
| | TCCCAGTCATAGCTGTCCCT | | GCCAGCATATGGGC |
| | CTTCTCTTATGGAGATC (SEQ | | ATATGTTGCCAAACT |
| | ID NO: 341) | | CTAAACCAAATACTC |
| | | | ATTCTGATGTTTTAA |
| | | | ATGATTTGCCCTCC |
| | | | CATATGTCCTTCCGA |
| | | | GTGAGAGACACAAA |
| | | | AAATTCCAACACAC |
| | | | TATTGCAATGAAAAT |
| | | | AAATTTCCTTTATTA |
| | | | GCCAGAAGTCAGAT |
| | | | GCTCAAGGGGCTTC |
| | | | ATGATGTCCCCATAA |
| | | | TTTTTGGCAGAGGG |
| | | | AAAAAGATCTCAGT |
| | | | GGTATTTGTGAGCC |
| | | | AGGGCATTGGCCAC |
| | | | ACCAGCCACCACCT |
| | | | TCTGATAGGCAGCC |
| | | | TGCACCTGAGGAGT |
| | | | GAACTATGGCCCTGA |
| | | | CTGGAA |
| | | | (SEQ ID NO: 342) |
| THYMIDINE | GGGGGAGGCTAACTGAAAC | TRANSPORT | ATCCTTCCAGTCAGG |
| KINASE (TK) | ACGGAAGGAGACAATACCG | OF RNA INTO | GCCATGTTTGAGAGC |
| | GAAGGAACCCGCGCTATGAC | CYTOPLASM; | TAGAAATAGCAAGTT |
| | GGCAATAAAAAGACAGAATA | ENHANCED | TAAATAAGGCTAGTC |
| | AAACGCACGGGTGTTGGGT | RNA | CGTTATCAACTTGAA |
| | CGTTTGTTCATAAACGCGGG | STABILITY | AAAGTGGGACCGAG |
| | GTTCGGTCCCAGGGCTGGCA | AND | TCGGTCCACCTGAACC |
| | CTCTGTCGATACCCCACCGA | EXPRESSION | GTATATCCTATGGCAG |
| | GACCCCATTGGGGCCAATAC | OF ENCODED | GGCCTGCCGCCCCG |
| | GCCCGCGTTTCTTCCTTTTCC | PROTEIN | ACGTTGGCTGCGAG |
| | CCACCCCACCCCCCAAGTTC | | CCCTGGGCCTTCAC |
| | GGGTGAAGGCCCAGGGCTC | | CCGAACTTGGGGGG |
| | GCAGCCAACGTCGGGGCGG | | TGGGGTGGGGAAAA |
| | CAGGCCCTGCCATAG (SEQ | | GGAAGAAACGCGG |
| | ID NO: 343) | | GCGTATTGGCCCCA |
| | | | ATGGGGTCTCGGTG |
| | | | GGGTATCGACAGAG |
| | | | TGCCAGCCCTGGGA |
| | | | CCGAACCCCGCGTT |
| | | | TATGAACAAACGAC |
| | | | CCAACACCCGTGCG |
| | | | TTTTATTCTGTCTTT |
| | | | TTATTGCCGTCATAG |
| | | | CGCGGGTTCCTTCC |
| | | | GGTATTGTCTCCTTC |
| | | | CGTGTTTCAGTTAG |
| | | | CCTCCCCCCTATGGC |
| | | | CCTGACTGGAA |
| | | | (SEQ ID NO: 344) |
| MALAT1 ENE- | TAGGGTCATGAAGGTTTTTC | RESULTS IN | ATCCTTCCAGTCAGG |
| MASCRNA | TTTTCCTGAGAAAACAACAC | RETENTION OF | GCCATGTTTGAGAGC |
| | GTATTGTTTTCTCAGGTTTTG | RNA IN | TAGAAATAGCAAGTT |
| | CTTTTTGGCCTTTTTCTAGCT | NUCLEUS, | TAAATAAGGCTAGTC |
| | TAAAAAAAAAAAAAGCAAA | TRANSCRIPT | CGTTATCAACTTGAA |
| | AGATGCTGGTGGTTGGCACT | TERMINATION | AAAGTGGGACCGAG |
| | CCTGGTTTCCAGGACGGGGT | AND | TCGGTCCACCTGAACC |
| | TCAAATCCCTGCGGCGTCTT | STABILIZATION | GTATATCAGTCAAAG |
| | TGCTTTGACT (SEQ ID NO: | | CAAAGACGCCGCAG |
| | 345) | | GGATTTGAACCCCG |
| | | | TCCTGGAAACCAGG |
| | | | AGTGCCAACCACCA |
| | | | GCATCTTTTGCTTTT |
| | | | TTTTTTTTTAAGCTA |
| | | | GAAAAAGGCCAAAA |
| | | | AGCAAAACCTGAGA |
| | | | AAACAATACGTGTT |
| | | | GTTTTCTCAGGAAA |
| | | | AGAAAAACCTTCAT |
| | | | GACCCTACTATGGCC |
| | | | CTGACTGGAA |
| | | | (SEQ ID NO: 346) |
| KSHV PAN ENE | TGTTTTGGCTGGGTTTTTCCT | RESULTS IN | ATCCTTCCAGTCAGG |
| | TGTTCGCACCGGACACCTCC | RETENTION OF | GCCATGTTTGAGAGC |
| | AGTGACCAGACGGCAAGGT | RNA IN | TAGAAATAGCAAGTT |
| | TTTTATCCCAGTGTATATTGG | NUCLEUS, | TAAATAAGGCTAGTC |
| | AAAAACATGTTATACTTTTG | TRANSCRIPT | CGTTATCAACTTGAA |
| | ACAATTTAACGTGCCTAGAG | TERMINATION | AAAGTGGGACCGAG |
| | CTCAAATTAAACTAATACCAT | AND | TCGGTCCACCTGAACC |
| | AACGTAATGCAACTTACAAC | STABILIZATION | GTATATCTTTTTTTTT |
| | ATAAATAAAGGTCAATGTTT | | TTTTTTTTTTATGGA |
| | AATCCATAAAAAAAAAAAA | | TTAAACATTGACCTT |
| | AAAAAAA (SEQ ID NO: 347) | | TATTTATGTTGTAAG |
| | | | TTGCATTACGTTATG |
| | | | GTATTAGTTTAATTT |
| | | | GAGCTCTAGGCACG |
| | | | TTAAATTGTCAAAA |
| | | | GTATAACATGTTTTT |
| | | | CCAATATACACTGG |
| | | | GATAAAAACCTTGC |
| | | | CGTCTGGTCACTGG |
| | | | AGGTGTCCGGTGCG |
| | | | AACAAGGAAAAACC |
| | | | CAGCCAAAACACTAT |
| | | | GGCCCTGACTGGAA |
| | | | (SEQ ID NO: 348) |
| THREE, | TGTTTTGGCTGGGTTTTTCCT | RESULTS IN | ATCCTTCCAGTCAGG |
| SEQUENTIAL | TGTTCGCACCGGACACCTCC | RETENTION OF | GCCATGTTTGAGAGC |
| KSHV PAN | AGTGACCAGACGGCAAGGT | RNA IN | TAGAAATAGCAAGTT |
| ENES WITH | TTTTATCCCAGTGTATATTGG | NUCLEUS, | TAAATAAGGCTAGTC |
| SHORT, | AAAAACATGTTATACTTTTG | TRANSCRIPT | CGTTATCAACTTGAA |
| UNCONSERVED | ACAATTTAACGTGCCTAGAG | TERMINATION | AAAGTGGGACCGAG |
| RNA | CTCAAATTAAACTAATACCAT | AND | TCGGTCCACCTGAACC |
| LINKERS | AACGTAATGCAACTTACAAC | STABILIZATION, | GTATATCTTTTTTTTT |
| | ATAAATAAAGGTCAATGTTT | PREDICTED | TTTTTTTTTTATGGA |
| | AATCCATAAAAAAAAAAAA | TOBE | TTAAACATTGACCTT |
| | AAAAAAAACACACTGTTTTG | GREATER | TATTTATGTTGTAAG |
| | GCTGGGTTTTTCCTTGTTCG | THANA | TTGCATTACGTTATG |
| | CACCGGACACCTCCAGTGAC | SINGLE PAN | GTATTAGTTTAATTT |
| | CAGACGGCAAGGTTTTTATC | ENE | GAGCTCTAGGCACG |
| | CCAGTGTATATTGGAAAAAC | | TTAAATTGTCAAAA |
| | ATGTTATACTTTTGACAATTT | | GTATAACATGTTTTT |
| | AACGTGCCTAGAGCTCAAAT | | CCAATATACACTGG |
| | TAAACTAATACCATAACGTA | | GATAAAAACCTTGC |
| | ATGCAACTTACAACATAAAT | | CGTCTGGTCACTGG |
| | AAAGGTCAATGTTTAATCCA | | AGGTGTCCGGTGCG |
| | TAAAAAAAAAAAAAAAAAA | | AACAAGGAAAAACC |
| | ATCTCTCTGTTTTGGCTGGGT | | CAGCCAAAACAGAG |
| | TTTTCCTTGTTCGCACCGGA | | AGATTTTTTTTTTTT |
| | CACCTCCAGTGACCAGACG | | TTTTTTTATGGATTA |
| | GCAAGGTTTTTATCCCAGTG | | AACATTGACCTTTAT |
| | TATATTGGAAAAACATGTTAT | | TTATGTTGTAAGTTG |
| | ACTTTTGACAATTTAACGTG | | CATTACGTTATGGTA |
| | CCTAGAGCTCAAATTAAACT | | TTAGTTTAATTTGAG |
| | AATACCATAACGTAATGCAA | | CTCTAGGCACGTTA |
| | CTTACAACATAAATAAAGGT | | AATTGTCAAAAGTAT |
| | CAATGTTTAATCCATAAAAA | | AACATGTTTTTCCA |
| | AAAAAAAAAAAAAA (SEQ | | ATATACACTGGGATA |
| | ID NO: 349) | | AAAACCTTGCCGTC |
| | | | TGGTCACTGGAGGT |
| | | | GTCCGGTGCGAACA |
| | | | AGGAAAAACCCAGC |
| | | | CAAAACAGTGTGTT |
| | | | TTTTTTTTTTTTTTT |
| | | | TTTATGGATTAAACA |
| | | | TTGACCTTTATTTAT |
| | | | GTTGTAAGTTGCAT |
| | | | TACGTTATGGTATTA |
| | | | GTTTAATTTGAGCTC |
| | | | TAGGCACGTTAAAT |
| | | | TGTCAAAAGTATAA |
| | | | CATGTTTTTCCAATA |
| | | | TACACTGGGATAAA |
| | | | AACCTTGCCGTCTG |
| | | | GTCACTGGAGGTGT |
| | | | CCGGTGCGAACAAG |
| | | | GAAAAACCCAGCCA |
| | | | AAACACTATGGCCCT |
| | | | GACTGGAA |
| | | | (SEQ ID NO: 350) |
| SMBOX/U1 | CAGCAAGTTCAGAGAAATCT | RESULTS IN | ATCCTTCCAGTCAGG |
| SNRNABOX | GAACTTGCTGGATTTTTGGA | RETENTION OF | GCCATGTTTGAGAGC |
| | GCAGGGAGATGGAATAGGA | RNA IN | TAGAAATAGCAAGTT |
| | GCTTGCTCCGTCCACTCCAC | NUCLEUS AND | TAAATAAGGCTAGTC |
| | GCATCGACCTGGTATTGCAG | TRANSCRIPT | CGTTATCAACTTGAA |
| | TACCTCCAGGAACGGTGCAC | TERMINATION | AAAGTGGGACCGAG |
| | CCACTTTCTGGAGTTTCAAA | | TCGGTCCACCTGAACC |
| | AGTAGACTGTACGCTAAGGG | | GTATATCTTTAAGACG |
| | TCATATCTTTTTTTGTTTGGT | | CCAACCAAGACACA |
| | TTGTGTCTTGGTTGGCGTCT | | AACCAAACAAAAAA |
| | TAAA(SEQ ID NO: 351) | | AGATATGACCCTTA |
| | | | GCGTACAGTCTACT |
| | | | TTTGAAACTCCAGA |
| | | | AAGTGGGTGCACCG |
| | | | TTCCTGGAGGTACT |
| | | | GCAATACCAGGTCG |
| | | | ATGCGTGGAGTGGA |
| | | | CGGAGCAAGCTCCT |
| | | | ATTCCATCTCCCTGC |
| | | | TCCAAAAATCCAGC |
| | | | AAGTTCAGATTTCT |
| | | | CTGAACTTGCTGCT |
| | | | ATGGCCCTGACTGGAA |
| | | | (SEQ ID NO: 352) |
| U1 SNRNA 3′ | GTTTCAAAAGTAGACTGTAC | RESULTS IN | ATCCTTCCAGTCAGG |
| BOX | GCTAAGGGTCATATCTTTTTT | RETENTION OF | GCCATGTTTGAGAGC |
| | TGTTTGGTTTGTGTCTTGGTT | RNA IN | TAGAAATAGCAAGTT |
| | GGCGTCTTAAA (SEQ ID NO: | NUCLEUS AND | TAAATAAGGCTAGTC |
| | 353) | TRANSCRIPT | CGTTATCAACTTGAA |
| | | TERMINATION | AAAGTGGGACCGAG |
| | | | TCGGTCCACCTGAACC |
| | | | GTATATCTTTAAGACG |
| | | | CCAACCAAGACACA |
| | | | AACCAAACAAAAAA |
| | | | AGATATGACCCTTA |
| | | | GCGTACAGTCTACT |
| | | | TTTGAAACCTATGGC |
| | | | CCTGACTGGAA |
| | | | (SEQ ID NO: 354) |
| TRNA-LYSINE | GCCCGGCTAGCTCAGTCGGT | REPORTED TO | ATCCTTCCAGTCAGG |
| | AGAGCATGAGACTCTTAATC | ENABLE | GCCATGTTTGAGAGC |
| | TCAGGGTCGTGGGTTCGAGC | TRANSPORT | TAGAAATAGCAAGTT |
| | CCCACGTTGGGCG (SEQ ID | OF RNA TO | TAAATAAGGCTAGTC |
| | NO: 355) | MITOCHONDRIA | CGTTATCAACTTGAA |
| | | | AAAGTGGGACCGAG |
| | | | TCGGTCCACCTGAACC |
| | | | GTATATC |
| | | | CGCCCAACGTGGGG |
| | | | CTCGAACCCACGAC |
| | | | CCTGAGATTAAGAG |
| | | | TCTCATGCTCTACC |
| | | | GACTGAGCTAGCCG |
| | | | GGCCTATGGCCCTGA |
| | | | CTGGAA |
| | | | (SEQ ID NO: 356) |
| BROCCOLI | GAGACGGTCGGGTCCAGATA | VISUALIZATION | ATCCTTCCAGTCAGG |
| APTAMER | TTCGTATCTGTCGAGTAGAG | (FLUORESCENCE) | GCCATGTTTGAGAGC |
| | TGTGGGCTC (SEQ ID NO: | | TAGAAATAGCAAGTT |
| | 357) | | TAAATAAGGCTAGTC |
| | | | CGTTATCAACTTGAA |
| | | | AAAGTGGGACCGAG |
| | | | TCGGTCCACCTGAACC |
| | | | GTATATCGAGCCCAC |
| | | | ACTCTACTCGACAG |
| | | | ATACGAATATCTGGA |
| | | | CCCGACCGTCTCCT |
| | | | ATGGCCCTGACTGGAA |
| | | | (SEQ ID NO: 358) |
| SPINACH | GACGCAACTGAATGAAATGG | VISUALIZATION | ATCCTTCCAGTCAGG |
| APTAMER | TGAAGGACGGGTCCAGGTG | (FLUORESCENCE) | GCCATGTTTGAGAGC |
| | TGGCTGCTTCGGCAGTGCAG | | TAGAAATAGCAAGTT |
| | CTTGTTGAGTAGAGTGTGAG | | TAAATAAGGCTAGTC |
| | CTCCGTAACTAGTCGCGTC | | CGTTATCAACTTGAA |
| | (SEQ ID NO: 359) | | AAAGTGGGACCGAG |
| | | | TCGGTCCACCTGAACC |
| | | | GTATATCGACGCGAC |
| | | | TAGTTACGGAGCTC |
| | | | ACACTCTACTCAAC |
| | | | AAGCTGCACTGCCG |
| | | | AAGCAGCCACACCT |
| | | | GGACCCGTCCTTCA |
| | | | CCATTTCATTCAGTT |
| | | | GCGTCCTATGGCCCT |
| | | | GACTGGAA |
| | | | (SEQ ID NO: 360) |
| SPINACH2 | GATGTAACTGAATGAAATGG | VISUALIZATION | ATCCTTCCAGTCAGG |
| APTAMER | TGAAGGACGGGTCCAGTAG | (FLUORESCENCE) | GCCATGTTTGAGAGC |
| | GCTGCTTCGGCAGCCTACTT | | TAGAAATAGCAAGTT |
| | GTTGAGTAGAGTGTGAGCTC | | TAAATAAGGCTAGTC |
| | CGTAACTAGTTACATC (SEQ | | CGTTATCAACTTGAA |
| | ID NO: 361) | | AAAGTGGGACCGAG |
| | | | TCGGTCCACCTGAACC |
| | | | GTATATCGATGTAACT |
| | | | AGTTACGGAGCTCA |
| | | | CACTCTACTCAACA |
| | | | AGTAGGCTGCCGAA |
| | | | GCAGCCTACTGGAC |
| | | | CCGTCCTTCACCAT |
| | | | TTCATTCAGTTACAT |
| | | | CCTATGGCCCTGACTG |
| | | | GAA |
| | | | (SEQ ID NO: 362) |
| MANGO | GGCACGTACGAAGGGACGG | VISUALIZATION | ATCCTTCCAGTCAGG |
| APTAMER | TGCGGAGAGGAGAGTACGT | (FLUORESCENCE) | GCCATGTTTGAGAGC |
| | GC (SEQ ID NO: 363) | | TAGAAATAGCAAGTT |
| | | | TAAATAAGGCTAGTC |
| | | | CGTTATCAACTTGAA |
| | | | AAAGTGGGACCGAG |
| | | | TCGGTCCACCTGAACC |
| | | | GTATATCGCACGTAC |
| | | | TCTCCTCTCCGCAC |
| | | | CGTCCCTTCGTACG |
| | | | TGCCCTATGGCCCTG |
| | | | ACTGGAA |
| | | | (SEQ ID NO: 364) |
| HDV | GGCCGGCATGGTCCCAGCCT | 3′ END RNA | ATCCTTCCAGTCAGG |
| RIBOZYME | CCTCGCTGGCGCCGGCTGGG | PROCESSING | GCCATGTTTGAGAGC |
| | CAACATGCTTCGGCATGGCG | | TAGAAATAGCAAGTT |
| | AATGGGAC (SEQ ID NO: 365) | | TAAATAAGGCTAGTC |
| | | | CGTTATCAACTTGAA |
| | | | AAAGTGGGACCGAG |
| | | | TCGGTCCACCTGAACC |
| | | | GTATATCGTCCCATTC |
| | | | GCCATGCCGAAGCA |
| | | | TGTTGCCCAGCCGG |
| | | | CGCCAGCGAGGAG |
| | | | GCTGGGACCATGCC |
| | | | GGCCCTATGGCCCTG |
| | | | ACTGGAA |
| | | | (SEQ ID NO: 366) |
| N⁶- | GGACTCTAGGACTGGACTTT | TARGET FOR | ATCCTTCCAGTCAGG |
| METHYLADENOSINE | GGACT (SEQ ID NO: 367) | METHYLATION | GCCATGTTTGAGAGC |
| MARKER (M⁶A) | | (UNDERLINED | TAGAAATAGCAAGTT |
| | | A'S ARE | TAAATAAGGCTAGTC |
| | | METHYLATED). | CGTTATCAACTTGAA |
| | | M6A | AAAGTGGGACCGAG |
| | | METHYLATION | TCGGTCCACCTGAACC |
| | | CAN RESULT | GTATATCAGTCCAAA |
| | | IN ENHANCED | GTCCAGTCCTAGAG |
| | | RNA | TCCCTATGGCCCTGA |
| | | STABILITY | CTGGAA |
| | | AND | (SEQ ID NO: 368) |
| | | EXPRESSION, | |
| | | BUT IS NOT | |
| | | YET FULLY | |
| | | UNDERSTOOD | |

*each PEgRNA is shown in the 5′ to 3′ direction and has the following structural elements of FIG. 3F as designated by font type, as follows: 5′-spacer sequence (normal font)-gRNA core (underlined sequence)-homology arm (italicized)-RT template (bolded font)-primer binding site (italicized)-3′.

[0846] The PEgRNAs of the above table are designed to site-specifically insert examples of the above motifs into the HEXA gene (defective in Tay-Sachs disease) (e.g., GenBank No. KR710351.1 (SEQ ID NO: 369), however, this is only for purposes of illustration. The use of prime editing in RNA tagging is not limited to the HEXA gene and indeed may be any any. The HEXA mRNA has the following nucleotide sequence:

(SEQ ID NO: 369)
GTTCGTTGCAACAAATTGATGAGCAATGCTTTTTT
ATAATGCCAACTTTGTACAAAAAAGTTGGCATGAC
AAGTTCCAGGCTTTGGTTTTCGCTGCTGCTGGCGG
CAGCGTTCGCAGGACGGGCGACGGCCCTCTGGCCC
TGGCCTCAGAACTTCCAAACCTCCGACCAGCGCTA
CGTCCTTTACCCGAACAACTTTCAATTCCAGTACG
ATGTCAGCTCGGCCGCGCAGCCCGGCTGCTCAGTC
CTCGACGAGGCCTTCCAGCGCTATCGTGACCTGCT
TTTCGGTTCCGGGTCTTGGCCCCGTCCTTACCTCA
CAGGGAAACGGCATACACTGGAGAAGAATGTGTTG
GTTGTCTCTGTAGTCACACCTGGATGTAACCAGCT
TCCTACTTTGGAGTCAGTGGAGAATTATACCCTGA
CCATAAATGATGACCAGTGTTTACTCCTCTCTGAG
ACTGTCTGGGGAGCTCTCCGAGGTCTGGAGACTTT
TAGCCAGCTTGTTTGGAAATCTGCTGAGGGCACAT
TCTTTATCAACAAGACTGAGATTGAGGACTTTCCC
CGCTTTCCTCACCGGGGCTTGCTGTTGGATACATC
TCGCCATTACCTGCCACTCTCTAGCATCCTGGACA
CTCTGGATGTCATGGCGTACAATAAATTGAACGTG
TTCCACTGGCATCTGGTAGATGATCCTTCCTTCCC
ATATGAGAGCTTCACTTTTCCAGAGCTCATGAGAA
AGGGGTCCTACAACCCTGTCACCCACATCTACACA
GCACAGGATGTGAAGGAGGTCATTGAATACGCACG
GCTCCGGGGTATCCGTGTGCTTGCAGAGTTTGACA
CTCCTGGCCACACTTTGTCCTGGGGACCAGGTATC
CCTGGATTACTGACTCCTTGCTACCCTGGGTCTGA
GCCCTCTGGCACCTTTGGACCAGTGAATCCCAGTC
TCAATAATACCTATGAGTTCATGAGCACATTCTTC
TTAGAAGTCAGCTCTGTCTTCCCAGATTTTTATCT
TCATCTTGGAGGAGATGAGGTTGATTTCACCTGCT
GGAAGTCCAACCCAGAGATCCAGGACTTTATGAGG
AAGAAAGGCTTCGGTGAGGACTTCAAGCAGCTGGA
GTCCTTCTACATCCAGACGCTGCTGGACATCGTCT
CTTCTTATGGCAAGGGCTATGTGGTGTGGCAGGAG
GTGTTTGATAATAAAGTAAAGATTCAGCCAGACAC
AATCATACAGGTGTGGCGAGAGGATATTCCAGTGA
ACTATATGAAGGAGCTGGAACTGGTCACCAAGGCC
GGCTTCCGGGCCCTTCTCTCTGCCCCCTGGTACCT
GAACCGTATATCCTATGGCCCTGACTGGAAGGATT
TCTACGTAGTGGAACCCCTGGCATTTGAAGGTACC
CCTGAGCAGAAGGCTCTGGTGATTGGTGGAGAGGC
TTGTATGTGGGGAGAATATGTGGACAACACAAACC
TGGTCCCCAGGCTCTGGCCCAGAGCAGGGGCTGTT
GCCGAAAGGCTGTGGAGCAACAAGTTGACATCTGA
CCTGACATTTGCCTATGAACGTTTGTCACACTTCC
GCTGTGAGTTGCTGAGGCGAGGTGTCCAGGCCCAA
CCCCTCAATGTAGGCTTCTGTGAGCAGGAGTTTGA
ACAGACCTGCCCAACTTTCTTGTACAAAGTTGGCA
TTATAAGAAAGCATTGCTTATCAATTTGTTGCAAC
GAAC.

[0847] The corresponding HEXA protein has the following amino acid sequence:

(SEQ ID NO: 370)
MTSSRLWFSLLLAAAFAGRATALWPWPQNFQTSDQ
RYVLYPNNFQFQYDVSSAAQPGCSVLDEAFQRYRD
LLFGSGSWPRPYLTGKRHTLEKNVLVVSVVTPGCN
QLPTLESVENYTLTINDDQCLLLSETVWGALRGLE
TFSQLVWKSAEGTFFINKTEIEDFPRFPHRGLLLD
TSRHYLPLSSILDTLDVMAYNKLNVFHWHLVDDPS
FPYESFTFPELMRKGSYNPVTHIYTAQDVKEVIEY
ARLRGIRVLAEFDTPGHTLSWGPGIPGLLTPCYPG
SEPSGTFGPVNPSLNNTYEFMSTFFLEVSSVFPDF
YLHLGGDEVDFTCWKSNPEIQDFMRKKGFGEDFKQ
LESFYIQTLLDIVSSYGKGYVVWQEVFDNKVKIQP
DTIIQVWREDIPVNYMKELELVTKAGFRALLSAPW
YLNRISYGPDWKDFYVVEPLAFEGTPEQKALVIGG
EACMWGEYVDNTNLVPRLWPRAGAVAERLWSNKLT
SDLTFAYERLSHFRCELLRRGVQAQPLNVGFCEQE
FEQT.

[0848] Notably, the resulting RNA motifs would be included within the translated region of the HEXA gene, disrupting the function of the protein coding gene. Inserted polyadenylation motifs would result in premature transcript termination. This site is merely illustratrative of the potential PEgRNAs that could result in insertion of the listed RNA motifs of the above table within a genomic site that is transcribed and thus which would produce an RNA product.

[0849] PEgRNAs for use with PE for RNA tagging could be be expressed from a U6 promoter (in which case a single guanosine would be added to the 5′ end of the PEgRNA for guides that include protospacers that do not begin with a G and 6-7 thymine would be added to the 3′ end) or a pol II promoter such as pCMV (in which case it might be necessary to remove the intrinsically transcribed sequence of this promoter from the 5′ end of the RNA via a self-cleaving element or Csy4 motif, and a termination motif would need to be added to the 3′ end of the RNA that does not result in export of the RNA from the nucleus, such as the 3′ box motif listed above. Note that this motif would not be inserted into the genome as a result of PE, as it would be 3′ of the annealing region). The core PEgRNA scaffold is underlined, the homology and annealing regions are italicized, and the inserted sequence is bolded. Note that the sequence inserted is the reverse complement of the above examples—as described below and therefore these PEgRNAs would need to be targeted to the coding strand.

[0850] Also, note that self-cleaving ribozymes other than HDV need in some embodiments to be tailored to the given target site; that is, while HDV cleaves the encoded transcript immediately 5′ to itself, the cut sites for all other self-cleaving ribozymes are within the ribozyme itself. Therefore, the first and last roughly 5-10 nucleotides (and in some instances potentially more than 10) would actually be a part of the encoded sequence. As an example, to cleave the sequence 5′NNNNNTCATCCTGATAAACTGCAAA3′ (SEQ ID NO: 371) after the 5 Ns, where N is any nucleotide, using a hammerhead self-cleaving ribozyme, the following sequence would be inserted, where the underlined sequences form an imperfect RNA pairing element.

(SEQ ID NO: 372)
5′NNNNNCAGTTTGTACGGATGACTGATGAGTCCCAAATAGGA
CGAAACGCGCTTCGGTGCGTCTCATCCTGATAAACTGCAAA-3′.

[0851] There is significant flexibility in terms of the length and nature of this pairing element, and this would be true for any of the non-HDV self-cleaving ribozymes listed in the original submission. To install a hammerhead ribozyme to cleave the hexA mRNA using a PEgRNA with the same protospacer as the above listed constructs, the following PEgRNA sequence could be used (labels same as above):

5′ACCTGAACCGTATATCGACGCACCGAAGCGCGTTT
CGTCCTATTTGGGACTCATCAGGATATACGGTTCA
GGTGATATACGGTTCAGGTGACGCACCGAAGCGCG
TTTCGTCCTATTTGGGACTCATCAGACCTGAACCG
TATATCATCCTTCCAGTCAGGGCCATGTTTGAGAG
CTAGAAATAGCAAGTTTAAATAAGGCTAGTCCGTT
ATCAACTTGAAAAAGTGGGACCGAGTCGGTCCACC
TGAACCGTATATCGACGCACCGAAGCGCGTTTCGT
CCTATTTGGGACTCATCAGGATATACGGTTCAGGT
CTATGGCCCTGACTGGAA-3′

(wherein the core PEgRNA scaffold is underlined, the homology and annealing regions are italicized, and the inserted sequence is bolded) (SEQ ID NO: 373).

[0852] Designing other PEgRNA for insertion of RNA motifs may follow the general principle described herein. However, it is noted that many of RNA motifs are potentially highly structured, which could make it difficult for them to be reverse-transcribed and inserted into the genome. Although for some RNA sequences, such as simple hairpins, both the RNA sequence itself and its complement are structured. However, that is unlikely to be true for the sequences noted above. Therefore, when inserting these motifs, it would most likely be best for the PEgRNA to encode the reverse complement of these sequences, resulting in the insertion of the DNA sequence actually encoding the motif into the genome. Similarly, inclusion of a self-cleaving ribozyme in the PEgRNA template region would result in processing and inefficient activity, while inclusion of its reverse complement would not. Thus, these PEgRNAs will likely have to target the coding strand, whereas PEgRNAs encoding other types of insertions (such as therapeutic correction) would be able to theoretically target either strand.

[0853] Also, note that for many of the inserted motifs, the resulting PEgRNA might not be able to be transcribed from the U6 promoter, necessitating use of other promoters, such as pCMV. Similarly, longer PEgRNAs could also be less stable. Shorter motifs, such as m⁶A markers, would not have this challenge.

[0854] D. Use of Dual Prime Editing for Insertion of Immunoepitopes

[0855] Dual prime editing (e.g., such as the embodiment shown in FIG. 90) may also be used as a means to insert known immunogenicity epitopes into endogenous or foreign genomic DNA, resulting in modification of the corresponding proteins for therapeutic or biotechnological applications (see FIGS. 31 and 32). Prior to the invention of classical prime editing or dual prime editing, such insertions could be achieved only inefficiently and with high rates of indel formation from DSBs. prime editing solves the problem of high indel formation from insertion edits while generally offering higher efficiency than HDR. This lower rate of indel formation presents a major advantage of prime editing over HDR as a method for targeted DNA insertions, especially in the described application of inserting immunogenicity epitopes. The length of epitopes is in a range from few bases to hundreds of bases. Prime editor is an efficient approach to achieve such targeted insertions in mammalian cells.

[0856] The key concept of the invention is the use of dual prime editors to insert a nucleotide sequence containing previously described immunogenicity epitopes into endogenous or foreign genomic DNA for the downregulation and/or destruction of their protein products and/or expressing cell types. Nucleotide sequences for immunogenic epitope insertion would be targeted to genes in a manner to produce fusion proteins of the targeted gene's coded protein and the inserted immunogenic epitope's corresponding protein translation. Patient's immune systems will have been previously trained to recognize these epitopes as a result of standard prior immunization from routine vaccination against, for example, tetanus or diphtheria or measles. As a result of the immunogenic nature of the fused epitopes, patient's immune systems would be expected to recognize and disable the prime edited protein (not just the inserted epitope) and potentially the cells from which it was expressed.

[0857] Precise genome targeting technologies using the CRISPR/Cas system have recently been explored in a wide range of applications, including the insertion of engineered DNA sequences into targeted genomic loci. Previously, homology-directed repair (HDR) has been used for this application, requiring an ssDNA donor template and repair initiation by means of a double-stranded DNA break (DSB). This strategy offers the broadest range of possible changes to be made in cells and is the only method available to insert large DNA sequences into mammalian cells. However, HDR is hampered by undesired cellular side effects stemming from its initiating DSB, such as high levels of indel formation, DNA translocations, large deletions, and P53 activation. In addition to these drawbacks, HDR is limited by low efficiency in many cell types (T cells are a notable exception to this observation). Recent efforts to overcome these drawbacks include fusing human Rad51 mutants to a Cas9 D10A nickase (RDN), resulting in a DSB-free HDR system that features improved HDR product:indel ratios and lower off target editing, but is still hampered by cell-type dependencies and only modest HDR editing efficiency.

[0858] Recently developed fusions of Cas9 to reverse transcriptases (“Prime editors”) coupled with PEgRNAs represent a novel genome editing technology that offers a number of advantages over existing genome editing methods, including the ability to install any single nucleotide substitution, and to insert or delete any short stretch of nucleotides (up to at least several dozen bases) in a site-specific manner Notably, PE edits are achieved with generally low rates of unintended indels. As such, PE enables targeted insertion-based editing applications that have been previously impossible or impractical.

[0859] This particular aspect describes a method for using prime editing as a means to insert known immunogenicity epitopes into endogenous or foreign genomic DNA, resulting in modification of the corresponding proteins for therapeutic or biotechnological applications (see FIGS. 31 and 32). Prior to the invention of prime editing, such insertions could be achieved only inefficiently and with high rates of indel formation from DSBs. prime editing solves the problem of high indel formation from insertion edits while generally offering higher efficiency than HDR. This lower rate of indel formation presents a major advantage of prime editing over HDR as a method for targeted DNA insertions, especially in the described application of inserting immunogenicity epitopes. The length of epitopes is in a range from few bases to hundreds of bases. Prime editor is the most efficient and cleanest technology to achieve such targeted insertions in mammalian cells.

[0860] The key concept of this aspect is the use of prime editors to insert a nucleotide sequence containing previously described immunogenicity epitopes into endogenous or foreign genomic DNA for the downregulation and/or destruction of their protein products and/or expressing cell types. Nucleotide sequences for immunogenic epitope insertion would be targeted to genes in a manner to produce fusion proteins of the targeted gene's coded protein and the inserted immunogenic epitope's corresponding protein translation. Patient's immune systems will have been previously trained to recognize these epitopes as a result of standard prior immunization from routine vaccination against, for example, tetanus or diphtheria or measles. As a result of the immunogenic nature of the fused epitopes, patient's immune systems would be expected to recognize and disable the prime edited protein (not just the inserted epitope) and potentially the cells from which it was expressed.

[0861] Fusions to targeted genes would be engineered as needed to ensure the inserted epitope protein translation is exposed for immune system recognition. This could include targeted nucleotide insertions resulting in protein translations yielding C-terminal fusions of immunogenicity epitopes to targeted genes, N-terminal fusions of immunogenicity epitopes to targeted genes, or the insertion of nucleotides into genes so that immunogenicity epitopes are coded within surfaced-exposed regions of protein structure.

[0862] Protein linkers encoded as nucleotides inserted between the target gene sequence and the inserted immunogenicity epitope nucleotide sequence may need to be engineered as part of this invention to facilitate immune system recognition, cellular trafficking, protein function, or protein folding of the targeted gene. These inserted nucleotide-encoded protein linkers may include (but are not limited to) variable lengths and sequences of the XTEN linker or variable lengths and sequences of Glycine-Serine linkers. These engineered linkers have been previous used to successfully facilitate protein fusions. Examplary linkers may include any of those described herein, including the amino acid sequence (GGGGS)n (SEQ ID NO: 165), (G)n (SEQ ID NO: 166), (EAAAK)n (SEQ ID NO: 167), (GGS)n (SEQ ID NO: 168), (SGGS)n (SEQ ID NO: 169), (XP)n (SEQ ID NO: 170), or any combination thereof, wherein n is independently an integer between 1 and 30, and wherein X is any amino acid. In some embodiments, the linker comprises the amino acid sequence (GGS)n (SEQ ID NO: 176), wherein n is 1, 3, or 7. In some embodiments, the linker comprises the amino acid sequence SGSETPGTSESATPES (SEQ ID NO: 171). In some embodiments, the linker comprises the amino acid sequence SGGSSGGSSGSETPGTSESATPESSGGSSGGS (SEQ ID NO: 172). In some embodiments, the linker comprises the amino acid sequence SGGSGGSGGS (SEQ ID NO: 173). In some embodiments, the linker comprises the amino acid sequence SGGS (SEQ ID NO: 174).

[0863] Distinguishing features of this aspect include the ability to use previously acquired immune responses to specific amino acid sequences as a means to induce an immune response against otherwise non-immunogenic proteins. Another distinguishing feature is the ability to insert the nucleotide sequences of these immunogenic epitopes in a targets manner that does not induce high levels of unwanted indels as a by-product editing and is efficient in its insertion. This specific application of PE has the ability to combine cell type-specific delivery methods (such as AAV serotypes) to insert epitopes in cell types that are of interest to trigger an immune response to.

[0864] Prime editing as a means of inserting immunogenic epitopes into pathogenic genes could be used to program the patient's immune system to fight a wide variety of diseases (not limited to cancer as with immuno-oncology strategies). An immediately relevant use of this technology would be as a cancer therapeutic as it could undermine a tumor's immune escape mechanism by causing an immune response to a relevant oncogene like HER2 or growth factors like EGFR. Such an approach could seem similar to T-cell engineering, but one novel advance of this approach is that it can be utilized in many cell types and for diseases beyond cancer, without needed to generate and introduce engineered T-cells into patients.

[0865] Using PE to insert an immunogenicity epitope which most people are already vaccinated against (tetanus, pertussis, diphtheria, measles, mumps, rubella, etc.) into a foreign or endogenous gene that drives a disease, so the patient's immune system learns to disable that protein.

[0866] Diseases that stand to have a potential therapeutic benefit from the aforementioned strategy include those caused by aggregation of toxic proteins, such as in fatal familial insomnia. Other diseases that could benefit include those caused by pathogenic overexpression of an otherwise nontoxic endogenous protein, and those caused by foreign pathogens.

[0867] Primary therapeutic indications include those mentioned above such as therapeutics for cancer, prion and other neurodegenerative diseases, infectious diseases, and preventative medicine. Secondary therapeutic indications may include preventative care for patients with late-onset genetic diseases. It is expected that current standard of care medicines may be used in conjunction with prime editing for some diseases, like particularly aggressive cancers, or in cases where medications help alleviate disease symptoms until the disease completely cured. Below are examples of immunoepitopes that may be inserted into genes by the herein disclosed prime editors:

| | | EPITOPE AMINO | |
|---|---|---|---|
| VACCINE | DISEASE | ACID SEQUENCE | EXAMPLE NUCLEIC ACID SEQUENCE (8) |
| 1 | TETANUS | QYIKANSKFIGITEL | CATGATATAAAAGCAAATTCTAAATTTATA |
| | TOXOID | (SEQ ID NO: 396) | GGTATAACTGAACTA (SEQ ID NO: 397) |
| 2 | DIPHTHERIA | GADDVVDSSKSFV | GGCGCCGACGACGTGGTGGACAGCAGCA |
| | TOXIN | MENFSSYHGTKPG | AGAGCTTCGTGATGGAGAACTTCAGCAGC |
| | MUTANT | YVDSIQKGIQKPKS | TACCACGGCACCAAGCCCGGCTACGTGGA |
| | CRM197 | GTQGNYDDDWKEF | CAGCATCCAGAAGGGCATCCAGAAGCCCA |
| | | YSTDNKYDAAGYS | AGAGCGGCACCCAGGGCAACTACGACGA |
| | | VDNENPLSGKAGG | CGACTGGAAGGAGTTCTACAGCACCGAC |
| | | VVKVTYPGLTKVL | AACAAGTACGACGCCGCCGGCTACAGCGT |
| | | ALKVDNAETIKKEL | GGACAACGAGAACCCCCTGAGCGGCAAG |
| | | GLSLTEPLMEQVGT | GCCGGCGGCGTGGTGAAGGTGACCTACCC |
| | | EEFIKRFGDGASRV | CGGCCTGACCAAGGTGCTGGCCCTGAAG |
| | | VLSLPFAEGSSSVEY | GTGGACAACGCCGAGACCATCAAGAAGG |
| | | INNWEQAKALSVE | AGCTGGGCCTGAGCCTGACCGAGCCCCTG |
| | | LEINFETRGKRGQD | ATGGAGCAGGTGGGCACCGAGGAGTTCAT |
| | | AMYEYMAQACAG | CAAGAGGTTCGGCGACGGCGCCAGCAGG |
| | | NRVRRSVGSSLSCI | GTGGTGCTGAGCCTGCCCTTCGCCGAGGG |
| | | NLDWDVIRDKTKT | CAGCAGCAGCGTGGAGTACATCAACAACT |
| | | KIESLKEHGPIKNK | GGGAGCAGGCCAAGGCCCTGAGCGTGGA |
| | | MSESPNKTVSEEKA | GCTGGAGATCAACTTCGAGACCAGGGGC |
| | | KQYLEEFHQTALEH | AAGAGGGGCCAGGACGCCATGTACGAGT |
| | | PELSELKTVTGTNP | ACATGGCCCAGGCCTGCGCCGGCAACAG |
| | | VFAGANYAAWAVN | GGTGAGGAGGAGCGTGGGCAGCAGCCTG |
| | | VAQVIDSETADNLE | AGCTGCATCAACCTGGACTGGGACGTGAT |
| | | KTTAALSILPGIGSV | CAGGGACAAGACCAAGACCAAGATCGAG |
| | | MGIADGAVHHNTE | AGCCTGAAGGAGCACGGCCCCATCAAGA |
| | | EIVAQSIALSSLMVA | ACAAGATGAGCGAGAGCCCCAACAAGAC |
| | | QAIPLVGELVDIGFA | CGTGAGCGAGGAGAAGGCCAAGCAGTAC |
| | | AYNFVESIINLFQVV | CTGGAGGAGTTCCACCAGACCGCCCTGGA |
| | | HNSYNRPAYSPGHK | GCACCCCGAGCTGAGCGAGCTGAAGACC |
| | | TQPFLHDGYAVSW | GTGACCGGCACCAACCCCGTGTTCGCCGG |
| | | NTVEDSIIRTGFQGE | CGCCAACTACGCCGCCTGGGCCGTGAACG |
| | | SGHDIKITAENTPLP | TGGCCCAGGTGATCGACAGCGAGACCGCC |
| | | IAGVLLPTIPGKLDV | GACAACCTGGAGAAGACCACCGCCGCCC |
| | | NKSKTHISVNGRKI | TGAGCATCCTGCCCGGCATCGGCAGCGTG |
| | | RMRCRAIDGDVTF | ATGGGCATCGCCGACGGCGCCGTGCACCA |
| | | CRPKSPVYVGNGV | CAACACCGAGGAGATCGTGGCCCAGAGC |
| | | HANLHVAFHRSSSE | ATCGCCCTGAGCAGCCTGATGGTGGCCCA |
| | | KIHSNEISSDSIGVL | GGCCATCCCCCTGGTGGGCGAGCTGGTGG |
| | | GYQKTVDHTKVNS | ACATCGGCTTCGCCGCCTACAACTTCGTG |
| | | KLSLFFEIKS (SEQ | GAGAGCATCATCAACCTGTTCCAGGTGGT |
| | | ID NO: 398) | GCACAACAGCTACAACAGGCCCGCCTACA |
| | | | GCCCCGGCCACAAGACCCAGCCCTTCCTG |
| | | | CACGACGGCTACGCCGTGAGCTGGAACA |
| | | | CCGTGGAGGACAGCATCATCAGGACCGGC |
| | | | TTCCAGGGCGAGAGCGGCCACGACATCA |
| | | | AGATCACCGCCGAGAACACCCCCCTGCCC |
| | | | ATCGCCGGCGTGCTGCTGCCCACCATCCC |
| | | | CGGCAAGCTGGACGTGAACAAGAGCAAG |
| | | | ACCCACATCAGCGTGAACGGCAGGAAGAT |
| | | | CAGGATGAGGTGCAGGGCCATCGACGGC |
| | | | GACGTGACCTTCTGCAGGCCCAAGAGCCC |
| | | | CGTGTACGTGGGCAACGGCGTGCACGCCA |
| | | | ACCTGCACGTGGCCTTCCACAGGAGCAGC |
| | | | AGCGAGAAGATCCACAGCAACGAGATCA |
| | | | GCAGCGACAGCATCGGCGTGCTGGGCTAC |
| | | | CAGAAGACCGTGGACCACACCAAGGTGA |
| | | | ACAGCAAGCTGAGCCTGTTCTTCGAGATC |
| | | | AAGAGC (SEQ ID NO: 399) |
| 3 | MUMPS | GTYRLIPNARANLT | GGCACCTACAGGCTGATCCCCAACGCCAG |
| | IMMUNO- | A (SEQ ID NO: 400) | GGCCAACCTGACCGCC (SEQ ID NO: 401) |
| | EPITOPE 1 | | |
| 4 | MUMPS | PSKFFTISDSATFAP | CCGAGCAAATTTTTTACCATTAGCGATAGC |
| | IMMUNO- | GPVSNA (SEQ ID | GCGACCTTTGCGCCGGGCCCGGTGAGCAA |
| | EPITOPE 2 | NO: 402) | CGCG (SEQ ID NO: 403) |
| | MUMPS | PSKLFIMLDNATFAP | CCGAGCAAACTGTTTATTATGCTGGATAAC |
| | IMMUNO- | GPVVNA (SEQ ID | GCGACCTTTGCGCCGGGCCCGGTGGTGAA |
| | EPITOPE 1 | NO: 404) | CGCG (SEQ ID NO: 405) |
| | | | SELECTED EXAMPLES FROM |
| | | | HEMAGGLUTININ-NEURAMINIDASE (HN) |
| | | | DIVERSITY AMONG OUTBREAK STRAINS |
| | | | (TABLE1) DIVERGENCE BETWEEN |
| | | | VACCINE STRAIN JL5 AND OUTBREAK |
| | | | STRAINS (TABLE2) |
| 5 | RUBELLA | TPPPYQVSCGGESD | ACCCCCCCCCCCTACCAGGTGAGCTGCGG |
| | VIRUS (RV) | RASARVIDPAAQS | CGGCGAGAGCGACAGGGCCAGCGCCAGG |
| | | (SEQ ID NO: 406) | GTGATCGACCCCGCCGCCCAGAGC (SEQ |
| | | | ID NO: 407) |
| 6 | HEMAGGLUTININ | PEYAYKIVKNKKME | CCCGAGTACGCCTACAAGATCGTGAAGAA |
| | | DGFLQGMVDGWY | CAAGAAGATGGAGGACGGCTTCCTGCAG |
| | | GHHSNEQGSGLME | GGCATGGTGGACGGCTGGTACGGCCACCA |
| | | NERTLDKANPNND | CAGCAACGAGCAGGGCAGCGGCCTGATG |
| | | LCSWSDHEASSNNT | GAGAACGAGAGGACCCTGGACAAGGCCA |
| | | NQEDLLQRESRRK | ACCCCAACAACGACCTGTGCAGCTGGAG |
| | | KRIGTSTLNQRGNC | CGACCACGAGGCCAGCAGCAACAACACC |
| | | NTKCQTEEARLKRE | AACCAGGAGGACCTGCTGCAGAGGGAGA |
| | | EVSLVKSDQCSNGS | GCAGGAGGAAGAAGAGGATCGGCACCAG |
| | | LQCRANNSTEQVD | CACCCTGAACCAGAGGGGCAACTGCAAC |
| | | (SEQ ID NO: 408) | ACCAAGTGCCAGACCGAGGAGGCCAGGC |
| | | | TGAAGAGGGAGGAGGTGAGCCTGGTGAA |
| | | | GAGCGACCAGTGCAGCAACGGCAGCCTG |
| | | | CAGTGCAGGGCCAACAACAGCACCGAGC |
| | | | AGGTGGAC (SEQ ID NO: 409) |
| 7 | NEURAMINIDASE | TKSTNSRSGGISGP | ACCAAGAGCACCAACAGCAGGAGCGGCG |
| | | DNEAPVGEAPSPYG | GCATCAGCGGCCCCGACAACGAGGCCCCC |
| | | DNPRPNDGNNIRIG | GTGGGCGAGGCCCCCAGCCCCTACGGCG |
| | | SKGYNGIITDTIEES | ACAACCCCAGGCCCAACGACGGCAACAA |
| | | CSCYPDAKVVKSV | CATCAGGATCGGCAGCAAGGGCTACAACG |
| | | ELDSTIWTSGSSPN | GCATCATCACCGACACCATCGAGGAGAGC |
| | | QKIITIGWDPNGWT | TGCAGCTGCTACCCCGACGCCAAGGTGGT |
| | | GTPMSPNGAYGTD | GAAGAGCGTGGAGCTGGACAGCACCATC |
| | | GPSNGQANQHQAE | TGGACCAGCGGCAGCAGCCCCAACCAGA |
| | | SISAGNSSLCPIRDN | AGATCATCACCATCGGCTGGGACCCCAAC |
| | | WHGSNRSWSWPD | GGCTGGACCGGCACCCCCATGAGCCCCAA |
| | | GAE (SEQ ID NO: | CGGCGCCTACGGCACCGACGGCCCCAGC |
| | | 410) | AACGGCCAGGCCAACCAGCACCAGGCCG |
| | | | AGAGCATCAGCGCCGGCAACAGCAGCCT |
| | | | GTGCCCCATCAGGGACAACTGGCACGGCA |
| | | | GCAACAGGAGCTGGAGCTGGCCCGACGG |
| | | | CGCCGAG (SEQ ID NO: 411) |
| 8 | TAP1 | EKIVLLLAMMEKIV | GAGAAGATCGTGCTGCTGCTGGCCATGAT |
| | (TRANSPORT | LLLAKCQTPMGAIK | GGAGAAGATCGTGCTGCTGCTGGCCAAGT |
| | ANTIGEN | AVDGVTNKCPYLG | GCCAGACCCCCATGGGCGCCATCAAGGCC |
| | PRESENTATION) | SPSF (SEQ ID NO: | GTGGACGGCGTGACCAACAAGTGCCCCTA |
| | ON | 412) | CCTGGGCAGCCCCAGCTTC (SEQ ID NO: |
| | H5N1 | | 413) |
| | VIRUS | | |
| | HEMAGGLUTININ | | |
| 9 | TAP2 | IRPCFWVELNPNQK | ATCAGGCCCTGCTTCTGGGTGGAGCTGAA |
| | (TRANSPOR | IITIRPCFWVELICYP | CCCCAACCAGAAGATCATCACCATCAGGC |
| | T ANTIGEN | DAGEIT (SEQ ID | CCTGCTTCTGGGTGGAGCTGATCTGCTAC |
| | PRESENTATION) | NO: 414) | CCCGACGCCGGCGAGATCACC (SEQ ID |
| | ON | | NO: 415) |
| | H5N1 | | |
| | VIRUS | | |
| | NEURAMINIDASE | | |
| 10 | HEMAGGLUTININ | MEKIVLLLAEKIVL | ATGGAGAAGATCGTGCTGCTGCTGGCCGA |
| | EPITOPES | LLAMCPYLGSPSFK | GAAGATCGTGCTGCTGCTGGCCATGTGCC |
| | TOWARD | CQTPMGAIKAVDG | CCTACCTGGGCAGCCCCAGCTTCAAGTGC |
| | CLASS I | VTNK (SEQ ID NO: | CAGACCCCCATGGGCGCCATCAAGGCCGT |
| | HLA | 416) | GGACGGCGTGACCAACAAG (SEQ ID NO: |
| | | | 417) |
| 11 | NEURAMINIDASE | NPNQKIITICYPDAGE | AACCCCAACCAGAAGATCATCACCATCTGC |
| | EPITOPES | ITIRPCFWVELRPCFW | TACCCCGACGCCGGCGAGATCACCATCAGG |
| | TOWARD | VELI (SEQ ID NO: | CCCTGCTTCTGGGTGGAGCTGAGGCCCTGC |
| | CLASS I | 418) | TTCTGGGTGGAGCTGATC (SEQ ID NO: 419) |
| | HLA | | |
| 12 | HEMAGGLUTININ | MVSLVKSDQIGTSTL | ATGGTGAGCCTGGTGAAGAGCGACCAGATC |
| | EPITOPES | NQR (SEQ ID NO: 420) | GGCACCAGCACCCTGAACCAGAGG (SEQ ID |
| | TOWARD | | NO: 421) |
| | CLASS II | | |
| | HLA | | |
| 13 | NEURAMINIDASE | YNGIITDTI (SEQ ID | TACAACGGCATCATCACCGACACCATC (SEQ |
| | EPITOPES | NO: 422) | ID NO: 423) |
| | TOWARD | | |
| | CLASS II | | |
| | HLA | | |
| 14 | HEMAGGLUTININ | MEKIVLLLAEKIVLL | ATGGAGAAGATCGTGCTGCTGCTGGCCGAG |
| | EPITOPE | LAMMVSLVKSDQCP | AAGATCGTGCTGCTGCTGGCCATGATGGTG |
| | H5N1- | YLGSPSFIGTSTLNQR | AGCCTGGTGAAGAGCGACCAGTGCCCCTAC |
| | BOUND | KCQTPMGAIKAVDG | CTGGGCAGCCCCAGCTTCATCGGCACCAGC |
| | CLASS I | VTNK (SEQ ID NO: | ACCCTGAACCAGAGG (SEQ ID NO: 425) |
| | AND CLASS | 424) | |
| | II HLA | | |
| 15 | NEURAMINIDASE | NPNQKIITIYNGIITDT | AACCCCAACCAGAAGATCATCACCATCTAC |
| | EPITOPE | ICYPDAGEITIRPCFW | AACGGCATCATCACCGACACCATCTGCTAC |
| | H5N1- | VELRPCFWVELI | CCCGACGCCGGCGAGATCACCATCAGGCCC |
| | BOUND | (SEQ ID NO: 426) | TGCTTCTGGGTGGAGCTGAGGCCCTGCTTC |
| | CLASS I | | TGGGTGGAGCTGATC (SEQ ID NO: 427) |
| | AND | | |
| | CLASS II | | |
| | HLA | | |

[0868] Additional immunoepitopes may also be installed which are known in the art. Any of the immunoepitopes available from the Immune Epitope Database and Analysis Resource (iedb.org/epitopedetails_v3.php) (the contents of which are incorporated herein by reference) may be installed by the prime editors disclosed herein.

[0869] In some embodiments, the immunoepitopes which may be installed by the prime editors disclosed herein may include any of the following epitopes:

| | | | SEQ | |
|---|---|---|---|---|
| | | | ID | ACCESS. |
| NO. | DISEASE | EPITOPE AMINO ACID SEQUENCE | NO | NO. |
| 1 | TETANUS TOXOID | QYIKANSKFIGITEL | 396 | NA |
| 2 | DIPHTHERIA | GADDVVDSSKSFVMENFSSYHGTKPGYVDS | 428 | NA |
| | TOXIN MUTANT | IQKGIQKPKSGTQGNYDDDWKEFYSTDNKY | | |
| | CRM 197 | DAAGYSVDNENPLSGKAGGVVKVTYPGLTK | | |
| | | VLALKVDNAETIKKELGLSLTEPLMEQVGT | | |
| | | EEFIKRFGDGASRVVLSLPFAEGSSSVEYI | | |
| | | NNWEQAKALSVELEINFETRGKRGQDAMYE | | |
| | | YMAQACAGNRVRRSVGSSLSCINLDWDVIR | | |
| | | DKTKTKIESLKEHGPIKNKMSESPNKTVSE | | |
| | | EKAKQYLEEFHQTALEHPELSELKTVTGTN | | |
| | | PVFAGANYAAWAVNVAQVIDSETADNLEKT | | |
| | | TAALSILPGIGSVMGIADGAVHHNTEEIVA | | |
| | | QSIALSSLMVAQAIPLVGELVDIGFAAYNF | | |
| | | VESIINLFQVVHNSYNRPAYSPGHKTQPFL | | |
| | | HDGYAVSWNTVEDSIIRTGFQGESGHDIKI | | |
| | | TAENTPLPIAGVLLPTIPGKLDVNKSKTHI | | |
| | | SV | | |
| | | NGRKIRMRCRAIDGDVTFCRPKSPVYVGNG | | |
| | | VHANLHVAFHRSSSEKIHSNEISSDSIGVL | | |
| | | GYQKTVDHTKVNSKLSLFFEIKS | | |
| 3 | MUMPS | GTYRLIPNARANLTA | 400 | NA |
| 4 | MUMPS | PSKFFTISDSATFAPGPVSNA; | 402; | NA |
| | | PSKLFIMLDNATFAPGPVVNA | 404 | |
| 5 | RUBELLA VIRUS | TPPPYQVSCGGESDRASARVIDPAAQS | 406 | NA |
| | (RV) | | | |
| 6 | HEMAGGLUTININ | PEYAYKIVKNKKMEDGFLQGMVDGWYGHHS | 408 | NA |
| | | NEQGSGLMENERTLDKANPNNDLCSWSDHE | | |
| | | ASSNNTNQEDLLQRESRRKKRIGTSTLNQR | | |
| | | GNCNTKCQTEEARLKREEVSLVKSDQCSNG | | |
| | | SLQCRANNSTEQVD | | |
| 7 | NEURAMINIDASE | TKSTNSRSGGISGPDNEAPVGEAPSPYGDN | 410 | NA |
| | | PRPNDGNNIRIGSKGYNGIITDTIEESCSC | | |
| | | YPDAKVVKSVELDSTIWTSGSSPNQKIITI | | |
| | | GWDPNGWTGTPMSPNGAYGTDGPSNGQANQ | | |
| | | HQAESISAGNSSLCPIRDNWHGSNRSWSWP | | |
| | | DGAE | | |
| 8 | TAP (TRANSPORT | EKIVLLLAMMEKIVLLLAKCQTPMGAIKAV | 412 | NA |
| | ANTIGEN | DGVTNKCPYLGSPSF | | |
| | PRESENTATION) | | | |
| | ON H5N1 VIRUS | | | |
| | HEMAGGLUTININ | | | |
| 9 | TAP (TRANSPORT | IRPCFWVELNPNQKIITIRPCFWVELICYP | 414 | NA |
| | ANTIGEN | DAGEIT | | |
| | PRESENTATION) | | | |
| | ON H5N1 VIRUS | | | |
| | NEURAMINIDASE | | | |
| 10 | HEMAGGLUTININ | MEKIVLLLAEKIVLLLAMCPYLGSPSFKCQ | 416 | NA |
| | EPITOPES TOWARD | TPMGAIKAVDGVTNK | | |
| | CLASS I HLA | | | |
| 11 | NEURAMINIDASE | NPNQKIITICYPDAGEITIRPCFWVELRPC | 418 | NA |
| | EPITOPES TOWARD | FWVELI | | |
| | CLASS I HLA | | | |
| 12 | HEMAGGLUTININ | MVSLVKSDQIGTSTLNQR | 420 | NA |
| | EPITOPES TOWARD | | | |
| | CLASS II HLA | | | |
| 13 | NEURAMINIDASE | YNGIITDTI | 422 | NA |
| | EPITOPES TOWARD | | | |
| | CLASS II HLA | | | |
| 14 | HEMAGGLUTININ | MEKIVLLLAEKIVLLLAMMVSLVKSDQCPY | 424 | NA |
| | EPITOPE H5N1- | LGSPSFIGTSTLNQRKCQTPMGAIKAVDGV | | |
| | BOUND CLASS I | TNK | | |
| | AND CLASS II | | | |
| | HLA | | | |
| 15 | NEURAMINIDASE | NPNQKIITIYNGIITDTICYPDAGEITIRP | 426 | NA |
| | EPITOPE H5N1- | CFWVELRPCFWVELI | | |
| | BOUND CLASS I | | | |
| | AND CLASS II | | | |
| | HLA | | | |
| 16 | CORYNEBACTERIUM | AACAGNRVRRSVGSSLKC | 899 | SRC280292 |
| | DIPHTHERIAE | | | |
| 17 | MEASLES VIRUS | AADHCPVVEVNGVTI | 900 | P69353.1 |
| | STRAIN | | | |
| | EDMONSTON | | | |
| 18 | MEASLES VIRUS | AAHLPTGTPLDID | 901 | P04851.1 |
| | STRAIN | | | |
| | EDMONSTON | | | |
| 19 | BORDETELLA | AALAVWAGLAVQ | 902 | Q00879.1 |
| | PERTUSSIS | | | |
| 20 | MEASLES VIRUS | AALGVATAAQITAGI | 903 | P69353.1 |
| | STRAIN | | | |
| | EDMONSTON | | | |
| 21 | RUBELLA VIRUS | AALLNTPPPYQVSCGGESDRATAR | 904 | P07566.1 |
| | STRAIN THERIEN | | | |
| 22 | RUBELLA VIRUS | AAQSFTGVVYGTHTT | 905 | BAA28178.1 |
| 23 | RUBELLA VIRUS | ACEVEPAFGHSDAAC | 906 | BAA28178.1 |
| 24 | RUBELLA VIRUS | ACTFWAVNAYSSGGY | 907 | BAA28178.1 |
| 25 | RUBELLA VIRUS | ADDPLLR | 908 | BAA19893.1 |
| 26 | RUBELLA VIRUS | ADDPLLRT | 909 | CAJ88851.1 |
| 27 | MEASLES VIRUS | AEMICDIDTYIVEAG | 910 | P04851.1 |
| | STRAIN | | | |
| | EDMONSTON | | | |
| 28 | MEASLES VIRUS | AEMICDIDTYIVEAGLASFI | 911 | P04851.1 |
| | STRAIN | | | |
| | EDMONSTON | | | |
| 29 | MEASLES VIRUS | AEPLLSC | 912 | P04851.1 |
| | STRAIN | | | |
| | EDMONSTON | | | |
| 30 | BORDETELLA | AFVSTSSSRRYTEVY | 913 | CAD44970.1 |
| | PERTUSSIS | | | |
| 31 | BORDETELLA | AGFIYRETFCITTIYKTGQPAADHYYSKVT | 914 | P04979.1 |
| | PERTUSSIS | A | | |
| 32 | RUBELLA VIRUS | AGLLACCAKCLYYLR | 915 | BAA28178.1 |
| 33 | RUBELLA VIRUS | AHTTSDPWHPPG | 916 | BAA19893.1 |
| 34 | MEASLES VIRUS | AIAKLEDAKELLESS | 917 | P69353.1 |
| | STRAIN | | | |
| | EDMONSTON | | | |
| 35 | MEASLES VIRUS | AIDNLRASLETTNQA | 918 | P69353.1 |
| | STRAIN | | | |
| | EDMONSTON | | | |
| 36 | BORDETELLA | AKGVEFR | 919 | ACI16088.1 |
| | PERTUSSIS | | | |
| 37 | MEASLES VIRUS | AKWAVPTTRTDDKLR | 920 | P08362.1 |
| | STRAIN | | | |
| | EDMONSTON | | | |
| 38 | MEASLES VIRUS | ALAEVLKKPV | 921 | ABO69699.1 |
| | STRAIN | | | |
| | EDMONSTON | | | |
| 39 | MEASLES VIRUS | ALGVINTLEWIPRFK | 922 | P08362.1 |
| | STRAIN | | | |
| | EDMONSTON | | | |
| 40 | MEASLES VIRUS | ALHQSMLNSQAIDNL | 923 | P69353.1 |
| | STRAIN | | | |
| | EDMONSTON | | | |
| 41 | MEASLES VIRUS | ALIGILSLFV | 924 | ABI5411O.1 |
| | STRAIN | | | |
| | EDMONSTON | | | |
| 42 | RUBELLA VIRUS | ALLNTPPPYQVSCGGESDRA | 925 | CAJ88851.1 |
| 43 | RUBELLA VIRUS | ALLNTPPPYQVSCGGESDRASARV | 926 | CAJ88851.1 |
| | STRAIN M33 | | | |
| 44 | RUBELLA VIRUS | ALVEGLAPGGGNCHL | 927 | BAA28178.1 |
| 45 | BORDETELLA | AMAAWSERAGEA | 928 | P04977.1 |
| | PERTUSSIS | | | |
| 46 | MEASLES VIRUS | ANCASILCKCYTTGT | 929 | P69353.1 |
| | STRAIN | | | |
| | EDMONSTON | | | |
| 47 | BORDETELLA | ANPNPYTSRRSV | 930 | P04977.1 |
| | PERTUSSIS | | | |
| 48 | RUBELLA VIRUS | APGPGEVW | 931 | CAJ88851.1 |
| 49 | RUBELLA VIRUS | APLPPHTTERIETRSARHPWRIR | 932 | ABD64214.1 |
| 50 | RUBELLA VIRUS | APPMPPQPPRAHGQHYGHHHHQLPFLG | 933 | CAA33016.1 |
| | VACCINE STRAIN | | | |
| | RA27/3 | | | |
| 51 | RUBELLA VIRUS | APPTLPQPPCAHGQHYGHHHHQLPFLG | 934 | P07566.1 |
| | STRAIN THERIEN | | | |
| 52 | RUBELLA VIRUS | APPTLPQPPRAHGQHYGHHHHQLPFLG | 935 | ABD64214.1 |
| 53 | BORDETELLA | APQPGPQPPQPPQPQPEAPAPQ | 936 | P14283.3 |
| | PERTUSSIS | | | |
| 54 | RUBELLA VIRUS | AQLASYFNPGGSYYK | 937 | BAA28178.1 |
| 55 | MEASLES VIRUS | ARAAHLPTGTPLD | 938 | P04851.1 |
| | STRAIN | | | |
| | EDMONSTON | | | |
| 56 | MEASLES VIRUS | ARLVSEIAMHTTEDK | 939 | P04851.1 |
| | STRAIN | | | |
| | EDMONSTON | | | |
| 57 | MEASLES VIRUS | ARLVSEIAMHTTEDKISRAV | 940 | P04851.1 |
| | STRAIN | | | |
| | EDMONSTON | | | |
| 58 | MEASLES VIRUS | ASDVETAEGGEIHELLR | 941 | PO3422.1 |
| | STRAIN | | | |
| | EDMONSTON-B | | | |
| 59 | MEASLES | ASDVETAEGGEIHELLRLQ | 942 | ABO69699.1 |
| | MORBILLIVIRUS | | | |
| 60 | MEASLES VIRUS | ASDVETAEGGEIHELLRLQSR | 943 | P03422.1 |
| | STRAIN | | | |
| | EDMONSTON-B | | | |
| 61 | MEASLES | ASDVETAEGGEIHKLLRLQ | 944 | AAA63285.1 |
| | MORBILLIVIRUS | | | |
| 62 | RUBELLA VIRUS | ASDVLPGHWLQG | 945 | NP_740663.1 |
| | STRAIN M33 | | | |
| 63 | MEASLES VIRUS | ASELGITAEDARLVS | 946 | P04851.1 |
| | STRAIN | | | |
| | EDMONSTON | | | |
| 64 | MEASLES VIRUS | ASELGITAEDARLVSEIAMH | 947 | P04851.1 |
| | STRAIN | | | |
| | EDMONSTON | | | |
| 65 | MEASLES VIRUS | ASESSQDPQDSRR | 948 | P04851.1 |
| | STRAIN | | | |
| | EDMONSTON | | | |
| 66 | MEASLES VIRUS | ASILCKCYTTGTIIN | 949 | P69353.1 |
| | STRAIN | | | |
| | EDMONSTON | | | |
| 67 | RUBELLA VIRUS | ASPVCQRHSPDCSRL | 950 | BAA28178.1 |
| 68 | BORDETELLA | ASQARWTGATRA | 951 | BAF35031.1 |
| | PERTUSSIS | | | |
| 69 | RUBELLA VIRUS | ASYFNPGGSYYKQYHPTACEVEPAFGHS | 952 | P07566.1 |
| | STRAIN THERIEN | | | |
| 70 | MEASLES VIRUS | ASYKVMTRSSHQSLV | 953 | P69353.1 |
| | STRAIN | | | |
| | EDMONSTON | | | |
| 71 | BORDETELLA | ASYVKKPKEDVD | 954 | ACI16088.1 |
| | PERTUSSIS | | | |
| 72 | MEASLES VIRUS | ATAAQITAGIALHQS | 955 | P69353.1 |
| | STRAIN | | | |
| | EDMONSTON | | | |
| 73 | RUBELLA VIRUS | ATPERPRL | 956 | CAJ88851.1 |
| 74 | MEASLES VIRUS | AVCLGGLIGIPALIC | 957 | P69353.1 |
| | STRAIN | | | |
| | EDMONSTON | | | |
| 75 | MEASLES VIRUS | AVGPRQAQVSF | 958 | P04851.1 |
| | STRAIN | | | |
| | EDMONSTON | | | |
| 76 | RUBELLA VIRUS | AVNAYSSGGYAQLAS | 959 | BAA28178.1 |
| 77 | RUBELLA VIRUS | AVSETRQTWAEWAAA | 960 | BAA28178.1 |
| 78 | MEASLES VIRUS | AVTAPDTAADSELRR | 961 | P04851.1 |
| | STRAIN | | | |
| | EDMONSTON | | | |
| 79 | MEASLES VIRUS | AVTAPDTAADSELRRWIKYT | 962 | P04851.1 |
| | STRAIN | | | |
| | EDMONSTON | | | |
| 80 | BORDETELLA | AYGGIIKDAPPGAGFIYRETFC | 963 | P04979.1 |
| | PERTUSSIS | | | |
| 81 | RUBELLA VIRUS | CALPLAGLLACCAKC | 964 | BAA28178.1 |
| 82 | RUBELLA VIRUS | CARIWNGTQRACTFW | 965 | BAA28178.1 |
| 83 | MEASLES VIRUS | CARTLVSGSFGNRFI | 966 | P69353.1 |
| | STRAIN | | | |
| | EDMONSTON | | | |
| 84 | BORDETELLA | CASPYEGRYRDMYDALRBRLLY | 967 | SRC280066 |
| | PERTUSSIS | | | |
| 85 | BORDETELLA | CAVFVRSGQPVIGA | 968 | AAA83981.1 |
| | PERTUSSIS | | | |
| 86 | RUBELLA VIRUS | CCAKCLYYLRGAIAPR | 969 | BAA28178.1 |
| 87 | MEASLES VIRUS | CCRGRCNKKGEQVGM | 970 | P69353.1 |
| | STRAIN | | | |
| | EDMONSTON | | | |
| 88 | RUBELLA VIRUS | CEIPTDVSCEGLGAW | 971 | BAA28178.1 |
| 89 | BORDETELLA | CFGKDLKRPGSSPMEV | 972 | P0A3R5.1 |
| | PERTUSSIS | | | |
| 90 | MEASLES | CFQQACKGKIQALCE | 973 | P06830.1 |
| | MORBILLIVIRUS | | | |
| 91 | MEASLES | CFQQACKGKIQALCENPEWAPLKDNRIPS | 974 | AAR89413.1 |
| | MORBILLIVIRUS | | | |
| 92 | RUBELLA VIRUS | CGGESDRASARVIDP | 975 | BAA28178.1 |
| 93 | BORDETELLA | CITTIYKTGQPAADHYYSKVTA | 976 | P04979.1 |
| | PERTUSSIS | | | |
| 94 | MEASLES | CKGKIQALCENPEWA | 977 | AAR89413.1 |
| | MORBILLIVIRUS | | | |
| 95 | MEASLES VIRUS | CKPWQESRKNKAQ | 978 | P04851.1 |
| | STRAIN | | | |
| | EDMONSTON | | | |
| 96 | MEASLES VIRUS | CNKKGEQVGMSRPGL | 979 | P69353.1 |
| | STRAIN | | | |
| | EDMONSTON | | | |
| 97 | RUBELLA VIRUS | CNVTTEHPFCNTPHG | 980 | BAA28178.1 |
| 98 | BORDETELLA | CQVGSSNSAF | 981 | P04977.1 |
| | PERTUSSIS | | | |
| 99 | MEASLES | CSGPTTIRGQFS | 982 | P08362.1 |
| | MORBILLIVIRUS | | | |
| 100 | BORDETELLA | CTSPYDGKYWSMYSRL | 983 | AAA83981.1 |
| | PERTUSSIS | | | |
| 101 | MEASLES VIRUS | CVLADSESGGHITHS | 984 | P08362.1 |
| | STRAIN | | | |
| | EDMONSTON | | | |
| 102 | MEASLES | CYTTGTIINQDPDKILTYIAADHC | 985 | AAF02706.1 |
| | MORBILLIVIRUS | | | |
| 103 | RUBELLA VIRUS | DADDPLLR | 986 | CAJ88851.1 |
| 104 | MEASLES VIRUS | DARAAHLPTGTPLDI | 987 | P04851.1 |
| | STRAIN | | | |
| | EDMONSTON | | | |
| 105 | MEASLES VIRUS | DARAAHLPTGTPLDIDTASE | 988 | P04851.1 |
| | STRAIN | | | |
| | EDMONSTON | | | |
| 106 | MEASLES VIRUS | DCHAPTYLPAEVDGD | 989 | P08362.1 |
| | STRAIN | | | |
| | EDMONSTON | | | |
| 107 | RUBELLA VIRUS | DCSRLVGATPERPRL | 990 | BAA28178.1 |
| 108 | MEASLES VIRUS | DDKLRMETCFQQACK | 991 | P08362.1 |
| | STRAIN | | | |
| | EDMONSTON | | | |
| 109 | RUBELLA VIRUS | DDPLLRTA | 992 | CAJ88851.1 |
| 110 | RUBELLA VIRUS | DDPLLRTAPGPGEVW | 993 | BAA28178.1 |
| 111 | BORDETELLA | DDPPATVYRYD | 994 | P04977.1 |
| | PERTUSSIS | | | |
| 112 | BORDETELLA | DDPPATVYRYDSRPPED | 995 | CAD44970.1 |
| | PERTUSSIS | | | |
| 113 | BORDETELLA | DDPPATVYRYDSRPPEDV | 996 | ACI04548.1 |
| | PERTUSSIS | | | |
| 114 | MEASLES | DEVGLRTPQRFTDLV | 997 | P06830.1 |
| | MORBILLIVIRUS | | | |
| 115 | MEASLES VIRUS | DHCPVVEVNGVTIQV | 998 | P69353.1 |
| | STRAIN | | | |
| | EDMONSTON | | | |
| 116 | MEASLES VIRUS | DIDTASESSQDPQ | 999 | P04851.1 |
| | STRAIN | | | |
| | EDMONSTON | | | |
| 117 | MEASLES VIRUS | DINKVLEKLGYSGGD | 1000 | P69353.1 |
| | STRAIN | | | |
| | EDMONSTON | | | |
| 118 | BORDETELLA | DLIAYKQ | 1001 | ACI16088.1 |
| | PERTUSSIS | | | |
| 119 | MEASLES VIRUS | DLIGQKLGLKLLRYY | 1002 | P69353.1 |
| | STRAIN | | | |
| | EDMONSTON | | | |
| 120 | RUBELLA VIRUS | DLQKALEAQSRALRAELAA | 1003 | P07566.1 |
| 121 | MEASLES | DLQYVLATYDTSRVE | 1004 | P06830.1 |
| | MORBILLIVIRUS | | | |
| 122 | MEASLES VIRUS | DLSLRRFMV | 1005 | P04851.1 |
| | STRAIN | | | |
| | EDMONSTON | | | |
| 123 | MEASLES VIRUS | DLSNCMVALGELKLA | 1006 | P08362.1 |
| | STRAIN | | | |
| | EDMONSTON | | | |
| 124 | RUBELLA VIRUS | DLVEYIMNYTGNQQSRWGLGSPNC | 1007 | CAJ88851.1 |
| 125 | MEASLES | DLVKFISDKIKFLNP | 1008 | AAR89413.1 |
| | MORBILLIVIRUS | | | |
| 126 | MEASLES | DLVKFISTKIKFLNP | 1009 | SRC280117 |
| | MORBILLIVIRUS | | | |
| 127 | MEASLES VIRUS | DLYKSNHNNV | 1010 | P08362.1 |
| | STRAIN | | | |
| | EDMONSTON | | | |
| 128 | BORDETELLA | DNVLDHLTGR | 1011 | ACI04548.1 |
| | PERTUSSIS | | | |
| 129 | BORDETELLA | DNVLDHLTGRSC | 1012 | P04977.1 |
| | PERTUSSIS | | | |
| 130 | BORDETELLA | DNVLDHLTGRSCQ | 1013 | P04977.1 |
| | PERTUSSIS | | | |
| 131 | MEASLES | DPDKILTYIAA | 1014 | AAF02706.1 |
| | MORBILLIVIRUS | | | |
| 132 | RUBELLA VIRUS | DPGDLVEYIMNYTGNQQSR | 1015 | P07566.1 |
| | STRAIN THERIEN | | | |
| 133 | RUBELLA VIRUS | DPLLRTAP | 1016 | CAJ88851.1 |
| 134 | RUBELLA VIRUS | DPLLRTAPGPGEVWVTPVIGSQ | 1017 | CAJ88851.1 |
| 135 | MEASLES VIRUS | DPQDSRRSAEPLL | 1018 | P04851.1 |
| | STRAIN | | | |
| | EDMONSTON | | | |
| 136 | MEASLES VIRUS | DPVIDRLYLSSHRGV | 1019 | P08362.1 |
| | STRAIN | | | |
| | EDMONSTON | | | |
| 137 | MEASLES VIRUS | DQILRSMKGLSSTSI | 1020 | P69353.1 |
| | STRAIN | | | |
| | EDMONSTON | | | |
| 138 | MEASLES | DQYCADVAAEELMNA | 1021 | P06830.1 |
| | MORBILLIVIRUS | | | |
| 139 | MEASLES VIRUS | DSESGGHITH | 1022 | P08362.1 |
| | STRAIN | | | |
| | EDMONSTON | | | |
| 140 | MEASLES VIRUS | DTASESSQDPQDS | 1023 | P04851.1 |
| | STRAIN | | | |
| | EDMONSTON | | | |
| 141 | RUBELLA VIRUS | DTVMSVFALASYVQH | 1024 | BAA28178.1 |
| 142 | BORDETELLA | DVFQNGFTAWGNND | 1025 | P04977.1 |
| | PERTUSSIS | | | |
| 143 | RUBELLA VIRUS | DVGAVPPGKFVTAAL | 1026 | BAA28178.1 |
| 144 | CORYNEBACTERIUM | DVNKSKTHISVNGRKI | 1027 | CAE11230.1 |
| | DIPHTHERIAE | | | |
| 145 | RUBELLA VIRUS | DVSCEGLGAWVPAAP | 1028 | BAA28178.1 |
| 146 | RUBELLA VIRUS | DWASPVCQRHSPDCSRLVGATPERPRL | 1029 | P07566.1 |
| | STRAIN THERIEN | | | |
| 147 | MEASLES VIRUS | EARESYRETGPSR | 1030 | P04851.1 |
| | STRAIN | | | |
| | EDMONSTON | | | |
| 148 | BORDETELLA | EAVEAERAGRGTG | 1031 | ACI04548.1 |
| | PERTUSSIS | | | |
| 149 | MEASLES VIRUS | EDAKELLESSDQILR | 1032 | P69353.1 |
| | STRAIN | | | |
| | EDMONSTON | | | |
| 150 | MEASLES VIRUS | EDRRVKQSRGEAR | 1033 | P04851.1 |
| | STRAIN | | | |
| | EDMONSTON | | | |
| 151 | MEASLES VIRUS | EDSITIPYQGSGKGV | 1034 | P08362.1 |
| | STRAIN | | | |
| | EDMONSTON | | | |
| 152 | RUBELLA VIRUS | EEAFTYLCTAPGCAT | 1035 | BAA28178.1 |
| 153 | MEASLES VIRUS | EGFNMILGTILAQIW | 1036 | P04851.1 |
| | STRAIN | | | |
| | EDMONSTON | | | |
| 154 | MEASLES VIRUS | EGFNMILGTILAQIWVLLAK | 1037 | P04851.1 |
| | STRAIN | | | |
| | EDMONSTON | | | |
| 155 | RUBELLA VIRUS | EHPFCNTPHGQLEVQ | 1038 | BAA28178.1 |
| 156 | MEASLES VIRUS | EISDIEVQDPEGFNM | 1039 | P04851.1 |
| | STRAIN | | | |
| | EDMONSTON | | | |
| 157 | MEASLES VIRUS | EISDIEVQDPEGFNMILGTI | 1040 | P04851.1 |
| | STRAIN | | | |
| | EDMONSTON | | | |
| 158 | MEASLES VIRUS | EKPNLSSKRSE | 1041 | P08362.1 |
| | STRAIN | | | |
| | EDMONSTON | | | |
| 159 | MEASLES VIRUS | ELKLAALCHGEDSIT | 1042 | P08362.1 |
| | STRAIN | | | |
| | EDMONSTON | | | |
| 160 | MEASLES | ELMNALVNSTLLETR | 1043 | P06830.1 |
| | MORBILLIVIRUS | | | |
| 161 | MEASLES VIRUS | ELPRL | 1044 | P04851.1 |
| | STRAIN | | | |
| | EDMONSTON | | | |
| 162 | MEASLES | ENPEWAPLKDNRIPSYGVLSVDL | 1045 | AAR89413.1 |
| | MORBILLIVIRUS | | | |
| 163 | MEASLES VIRUS | EPIRD ALNAMTQNIR | 1046 | P69353.1 |
| | STRAIN | | | |
| | EDMONSTON | | | |
| 164 | MEASLES VIRUS | EQVGMSRPGLKPDLT | 1047 | P69353.1 |
| | STRAIN | | | |
| | EDMONSTON | | | |
| 165 | RUBELLA VIRUS | ERPRLRLV | 1048 | CAJ88851.1 |
| 166 | RUBELLA VIRUS | ERPRLRLVDADDPLL | 1049 | BAA28178.1 |
| 167 | MEASLES VIRUS | ESPGQLIQRITDDPDVS | 1050 | P04851.1 |
| | CAM/RB | | | |
| 168 | MEASLES VIRUS | ESRGIKARITHVDTE | 1051 | P69353.1 |
| | STRAIN | | | |
| | EDMONSTON | | | |
| 169 | MEASLES VIRUS | ESSCTFMPEGTVCSQ | 1052 | P69353.1 |
| | STRAIN | | | |
| | EDMONSTON | | | |
| 170 | MEASLES VIRUS | ESSQDPQDSRRSA | 1053 | P04851.1 |
| | STRAIN | | | |
| | EDMONSTON | | | |
| 171 | MEASLES VIRUS | ETRTTNQFLAVSKGN | 1054 | P08362.1 |
| | STRAIN | | | |
| | EDMONSTON | | | |
| 172 | MEASLES VIRUS | EVDGDVKLSSNLVIL | 1055 | P08362.1 |
| | STRAIN | | | |
| | EDMONSTON | | | |
| 173 | MEASLES VIRUS | EVNGVTIQV | 1056 | P26031.1 |
| | STRAIN | | | |
| | EDMONSTON-B | | | |
| 174 | RUBELLA VIRUS | EVWVTPVI | 1057 | CAJ88851.1 |
| 175 | RUBELLA VIRUS | EVWVTPVIGSQA | 1058 | BAA19893.1 |
| 176 | RUBELLA VIRUS | EWAAAHWWQLTLGAT | 1059 | BAA28178.1 |
| 177 | MEASLES | EWIPRFKVSPYLFTV | 1060 | P06830.1 |
| | MORBILLIVIRUS | | | |
| 178 | BORDETELLA | FEYVDTYGDNAG | 1061 | P04977.1 |
| | PERTUSSIS | | | |
| 179 | MEASLES | FGPLITHGSGMDLYK | 1062 | P06830.1 |
| | MORBILLIVIRUS | | | |
| 180 | MEASLES VIRUS | FIFD ALAEV | 1063 | ABK40531.1 |
| | STRAIN | | | |
| | EDMONSTON | | | |
| 181 | MEASLES VIRUS | FISDKIKFL | 1064 | P08362.1 |
| | STRAIN | | | |
| | EDMONSTON | | | |
| 182 | MEASLES VIRUS | FKRNKDKPPITSGSG | 1065 | P04851.1 |
| | STRAIN | | | |
| | EDMONSTON | | | |
| 183 | MEASLES VIRUS | FKRNKDKPPITSGSGGAIRG | 1066 | P04851.1 |
| | STRAIN | | | |
| | EDMONSTON | | | |
| 184 | RUBELLA VIRUS | FKTVRPVALPRTLAP | 1067 | BAA28178.1 |
| 185 | MEASLES VIRUS | FLMDRHIIV | 1068 | ABK40531.1 |
| | STRAIN | | | |
| | EDMONSTON | | | |
| 186 | MEASLES VIRUS | FMAVLLTLQTPTGQI | 1069 | P69353.1 |
| | STRAIN | | | |
| | EDMONSTON | | | |
| 187 | MEASLES VIRUS | FMPEGTVCSQNALYP | 1070 | P69353.1 |
| | STRAIN | | | |
| | EDMONSTON | | | |
| 188 | MEASLES | FMYMSLLGV | 1071 | AAN09804.1 |
| | MORBILLIVIRUS | | | |
| 189 | MEASLES VIRUS | FNVPIKEAGEDCHAP | 1072 | P08362.1 |
| | STRAIN | | | |
| | EDMONSTON | | | |
| 190 | MEASLES | FRDLTWCINPPERIK | 1073 | AAC35876.2 |
| | MORBILLIVIRUS | | | |
| 191 | MEASLES VIRUS | FSHDDPISSDQSRFG | 1074 | P04851.1 |
| | STRAIN | | | |
| | EDMONSTON | | | |
| 192 | MEASLES VIRUS | FSHDDPISSDQSRFGWFENK | 1075 | P04851.1 |
| | STRAIN | | | |
| | EDMONSTON | | | |
| 193 | MEASLES | FTDLVKFISDKIKFL | 1076 | P06830.1 |
| | MORBILLIVIRUS | | | |
| 194 | MEASLES | FTWDQKLWCRHFCVL | 1077 | P06830.1 |
| | MORBILLIVIRUS | | | |
| 195 | BORDETELLA | FVRDGQSVIGACASPYEGRYRDLYDALRRL | 1078 | SRC280066 |
| | PERTUSSIS | LY | | |
| 196 | BORDETELLA | FVRSGQPVIGACTSPYDGKYWSILYSRLRK | 1079 | SRC280066 |
| | PERTUSSIS | MLY | | |
| 197 | MEASLES | FYKDNPHPKGSRIVI | 1080 | P06830.1 |
| | MORBILLIVIRUS | | | |
| 198 | BORDETELLA | GAASSYFEYVDTYG | 1081 | ACI04548.1 |
| | PERTUSSIS | | | |
| 199 | BORDETELLA | GAFDLKTTFCIMTTRNTGQPA | 1082 | AAA83981.1 |
| | PERTUSSIS | | | |
| 200 | MEASLES VIRUS | GALIGILSLFVESPG | 1083 | P04851.1 |
| | STRAIN | | | |
| | EDMONSTON | | | |
| 201 | MEASLES VIRUS | GALIGILSLFVESPGQLIQR | 1084 | P04851.1 |
| | STRAIN | | | |
| | EDMONSTON | | | |
| 202 | RUBELLA VIRUS | GATPERPR | 1085 | CAJ88851.1 |
| 203 | BORDETELLA | GAYGRCPNGTRALTVAELRGNAEL | 1086 | P04979.1 |
| | PERTUSSIS | | | |
| 204 | RUBELLA VIRUS | GCFAPWDLEATGACI | 1087 | BAA28178.1 |
| 205 | MEASLES | GDINKVLEKLGYS | 1088 | BAB60865.1 |
| | MORBILLIVIRUS | | | |
| 206 | MEASLES | GDINKVLEKLGYSGGDLLG | 1089 | AAL29688.1 |
| | MORBILLIVIRUS | | | |
| 207 | RUBELLA VIRUS | GDLRAVHHRPVPA | 1090 | CAA28880.1 |
| 208 | RUBELLA VIRUS | GDLVEYIMNYTGNQQ | 1091 | BAA28178.1 |
| 209 | MEASLES VIRUS | GDSSITTRSRLLDRL | 1092 | P04851.1 |
| | STRAIN | | | |
| | EDMONSTON | | | |
| 210 | MEASLES VIRUS | GDSSITTRSRLLDRLVRLIG | 1093 | P04851.1 |
| | STRAIN | | | |
| | EDMONSTON | | | |
| 211 | MEASLES | GEDCHAPTYLPAEVD | 1094 | P06830.1 |
| | MORBILLIVIRUS | | | |
| 212 | MEASLES VIRUS | GELSTLESLMNLYQQ | 1095 | P04851.1 |
| | STRAIN | | | |
| | EDMONSTON | | | |
| 213 | MEASLES VIRUS | GELSTLESLMNLYQQMGKPA | 1096 | P04851.1 |
| | STRAIN | | | |
| | EDMONSTON | | | |
| 214 | MUMPS | GEQARYLALLEA | 1097 | P21186.1 |
| | RUBULAVIRUS | | | |
| 215 | RUBELLA VIRUS | GEVWVT | 1098 | BAA19893.1 |
| 216 | RUBELLA VIRUS | GEVWVTPV | 1099 | CAJ88851.1 |
| 217 | RUBELLA VIRUS | GEVWVTPVIGSQAR | 1100 | BAA19893.1 |
| 218 | BORDETELLA | GEYGGVIKDGTPGGA | 1101 | AAA83981.1 |
| | PERTUSSIS | | | |
| 219 | RUBELLA VIRUS | GFLSGVGPMRLRHGADT | 1102 | SRC265968 |
| 220 | MEASLES VIRUS | GFRASDVETAEGGEIHELLRLQ | 1103 | PO3422.1 |
| | STRAIN | | | |
| | EDMONSTON-B | | | |
| 221 | BORDETELLA | GGAVPGGAVPGGAVPGGFGPGGFGP | 1104 | P14283.3 |
| | PERTUSSIS | | | |
| 222 | BORDETELLA | GGAVPGGAVPGGFGPGGFGPGGFGP | 1105 | CAA09475.1 |
| | PERTUSSIS | | | |
| 223 | BORDETELLA | GGAVPGGAVPGGFGPGGFGPGGFGPGGFGP | 1106 | CAA09474.1 |
| | PERTUSSIS | | | |
| 224 | MEASLES | GGHITHSGMVGMGVS | 1107 | P06830.1 |
| | MORBILLIVIRUS | | | |
| 225 | MEASLES | GILESRGIKARITHVDTESY | 1108 | P26032.1 |
| | MORBILLIVIRUS | | | |
| 226 | BORDETELLA | GITGETTTTEYSNARYV | 1109 | CAD44970.1 |
| | PERTUSSIS | | | |
| 227 | MEASLES VIRUS | GKEDRRVKQSRGE | 1110 | P04851.1 |
| | STRAIN | | | |
| | EDMONSTON | | | |
| 228 | BORDETELLA | GKVTNGS | 1111 | ACI16088.1 |
| | PERTUSSIS | | | |
| 229 | RUBELLA VIRUS | GLGAWVPAAPCARIW | 1112 | BAA28178.1 |
| 230 | MEASLES VIRUS | GLIGIPALICCCRGR | 1113 | P69353.1 |
| | STRAIN | | | |
| | EDMONSTON | | | |
| 231 | RUBELLA VIRUS | GLLACCAKCLYYLRGAIAPR | 1114 | P07566.1 |
| | STRAIN THERIEN | | | |
| 232 | MEASLES | GLLAIAGIRLHRAAI | 1115 | P06830.1 |
| | MORBILLIVIRUS | | | |
| 233 | RUBELLA VIRUS | GLQPRADMAAPPTLPQ | 1116 | NP_740663.1 |
| 234 | MEASLES | GMGVSCTVTREDGTNRR | 1117 | AAR89413.1 |
| | MORBILLIVIRUS | | | |
| 235 | MEASLES | GMYGGTYLVEKP | 1118 | AAR89413.1 |
| | MORBILLIVIRUS | | | |
| 236 | BORDETELLA | GNAELQTYLRQITPGWSIYGLYDGTYLG | 1119 | P04979.1 |
| | PERTUSSIS | | | |
| 237 | RUBELLA VIRUS | GNCHLTVNGEDVGAV | 1120 | BAA28178.1 |
| 238 | BORDETELLA | GNNDNVLDHLTGR | 1121 | P04977.1 |
| | PERTUSSIS | | | |
| 239 | BORDETELLA | GNNDNVLDHLTGRSC | 1122 | P04977.1 |
| | PERTUSSIS | | | |
| 240 | MEASLES VIRUS | GNRFILSQGNLIANC | 1123 | P69353.1 |
| | STRAIN | | | |
| | EDMONSTON | | | |
| 241 | RUBELLA VIRUS | GNRGRGQRRDWSRAPPPPEERQETRSQTPA | 1124 | P07566.1 |
| | | PKPS | | |
| 242 | RUBELLA VIRUS | GPGEVWVT | 1125 | CAJ88851.1 |
| 243 | RUBELLA VIRUS | GPMRLRHGADTRCGRLI | 1126 | P07566.1 |
| | STRAIN THERIEN | | | |
| 244 | BORDETELLA | GPNHTKV | 1127 | ACI16083.1 |
| | PERTUSSIS | | | |
| 245 | MEASLES VIRUS | GPRQAQVSF | 1128 | P10050.1 |
| | STRAIN HALLE | | | |
| 246 | MEASLES VIRUS | GPRQAQVSFLQGDQS | 1129 | P04851.1 |
| | STRAIN | | | |
| | EDMONSTON | | | |
| 247 | MEASLES VIRUS | GPRQAQVSFLQGDQSENELP | 1130 | P04851.1 |
| | STRAIN | | | |
| | EDMONSTON | | | |
| 248 | MEASLES | GRGYNVSSIVTMTSQ | 1131 | P06830.1 |
| | MORBILLIVIRUS | | | |
| 249 | BORDETELLA | GRTPFII | 1132 | ACI16083.1 |
| | PERTUSSIS | | | |
| 250 | RUBELLA VIRUS | GSPNCHGPDWASPVC | 1133 | BAA28178.1 |
| 251 | RUBELLA VIRUS | GSQARKCGLHIRAGP | 1134 | BAA28178.1 |
| 252 | BORDETELLA | GSSNSAFVSTSSSRR | 1135 | P04977.1 |
| | PERTUSSIS | | | |
| 253 | MEASLES VIRUS | GSTKSCARTLVSGSF | 1136 | P69353.1 |
| | STRAIN | | | |
| | EDMONSTON | | | |
| 254 | RUBELLA VIRUS | GSYYKQYHPTACEVE | 1137 | BAA28178.1 |
| 255 | RUBELLA VIRUS | GTHTTAVSETRQTWA | 1138 | BAA28178.1 |
| 256 | MEASLES VIRUS | GTIINQDPDKILTYI | 1139 | P69353.1 |
| | STRAIN | | | |
| | EDMONSTON | | | |
| 257 | BORDETELLA | GTLVRMAPVIG | 1140 | ADA85124.1 |
| | PERTUSSIS | | | |
| 258 | MEASLES VIRUS | GTPLDIDTASESS | 1141 | P04851.1 |
| | STRAIN | | | |
| | EDMONSTON | | | |
| 259 | BORDETELLA | GTYLGQAYGGIIKDAPPGAGFIYRETFC | 1142 | P04979.1 |
| | PERTUSSIS | | | |
| 260 | BORDETELLA | GVATKGLGVHAKSSDWG | 1143 | P15318.2 |
| | PERTUSSIS | | | |
| 261 | CORYNEBACTERIUM | GVLLPTIPGKLDVNKSKTHI | 1144 | AAV70486.1 |
| | DIPHTHERIAE | | | |
| 262 | MEASLES | GVLSVDLSLTVELKI | 1145 | P06830.1 |
| | MORBILLIVIRUS | | | |
| 263 | MEASLES | GVPIELQVECFTWDQ | 1146 | P06830.1 |
| | MORBILLIVIRUS | | | |
| 264 | MEASLES VIRUS | GVSCTVTREDGTNRR | 1147 | P08362.1 |
| | STRAIN | | | |
| | EDMONSTON | | | |
| 265 | MEASLES VIRUS | GVSYNIGSQEWYTTV | 1148 | P69353.1 |
| | STRAIN | | | |
| | EDMONSTON | | | |
| 266 | MEASLES VIRUS | GYNVSSIVTMTSQGM | 1149 | P08362.1 |
| | STRAIN | | | |
| | EDMONSTON | | | |
| 267 | MEASLES | HFCVLADSESGGHIT | 1150 | P06830.1 |
| | MORBILLIVIRUS | | | |
| 268 | MEASLES | HGEDSITIPYQGSGK | 1151 | P06830.1 |
| | MORBILLIVIRUS | | | |
| 269 | RUBELLA VIRUS | HGPDWASP | 1152 | BAA19893.1 |
| 270 | RUBELLA VIRUS | HGPDWASPVCQRHSP | 1153 | BAA28178.1 |
| 271 | RUBELLA VIRUS | HGPDWASPVCQRHSPDCSRLVG | 1154 | CAJ88851.1 |
| 272 | RUBELLA VIRUS | HGPDWASPVCQRHSPDCSRLVGATPERPRL | 1155 | CAJ88851.1 |
| | STRAIN M33 | RLV | | |
| 273 | MEASLES VIRUS | HITHSGMEGMGVSCT | 1156 | P08362.1 |
| | STRAIN | | | |
| | EDMONSTON | | | |
| 274 | MEASLES | HKSLSTNLDVTNSIE | 1157 | P06830.1 |
| | MORBILLIVIRUS | | | |
| 275 | MEASLES VIRUS | HLMIDRPYV | 1158 | P08362.1 |
| | STRAIN | | | |
| | EDMONSTON | | | |
| 276 | MEASLES VIRUS | HLPTGTPLDIDTA | 1159 | P04851.1 |
| | STRAIN | | | |
| | EDMONSTON | | | |
| 277 | MEASLES VIRUS | HLPTGTPLDIDTATESSQDPQDSR | 1160 | Q77M43.1 |
| | STRAIN | | | |
| | EDMONSTON-B | | | |
| 278 | MEASLES | HMTNYLEQPVSNDLS | 1161 | P06830.1 |
| | MORBILLIVIRUS | | | |
| 279 | MEASLES VIRUS | HQSLVIKLMPNITLL | 1162 | P69353.1 |
| | STRAIN | | | |
| | EDMONSTON | | | |
| 280 | MEASLES | HRAAIYTAEIHKSLS | 1163 | P06830.1 |
| | MORBILLIVIRUS | | | |
| 281 | BORDETELLA | HRMQEAVEAERAGRGTGH | 1164 | P04977.1 |
| | PERTUSSIS | | | |
| 282 | MEASLES VIRUS | HVDTESYFIVLSIAY | 1165 | P69353.1 |
| | STRAIN | | | |
| | EDMONSTON | | | |
| 283 | MEASLES VIRUS | HWGNLSKIGVVGIGS | 1166 | P69353.1 |
| | STRAIN | | | |
| | EDMONSTON | | | |
| 284 | RUBELLA VIRUS | HWWQLTLGATCALPL | 1167 | BAA28178.1 |
| 285 | RUBELLA VIRUS | HYRNASDVLPGHWLQGGWGCYNL | 1168 | NP_740663.1 |
| 286 | MEASLES VIRUS | IDLGPPISLERLDVG | 1169 | P69353.1 |
| | STRAIN | | | |
| | EDMONSTON | | | |
| 287 | MEASLES VIRUS | IEAIRQAGQEMILAV | 1170 | P69353.1 |
| | STRAIN | | | |
| | EDMONSTON | | | |
| 288 | RUBELLA VIRUS | IETRSARHP | 1171 | CAA28880.1 |
| | STRAIN M33 | | | |
| 289 | MEASLES VIRUS | IGSQEWYTTVPKYVA | 1172 | P69353.1 |
| | STRAIN | | | |
| | EDMONSTON | | | |
| 290 | MEASLES VIRUS | IKGVIVHRLEGVSYN | 1173 | P69353.1 |
| | STRAIN | | | |
| | EDMONSTON | | | |
| 291 | MEASLES VIRUS | IKHIIIVPIPGDSSI | 1174 | P04851.1 |
| | STRAIN | | | |
| | EDMONSTON | | | |
| 292 | MEASLES VIRUS | IKHIIIVPIPGDSSITTRSR | 1175 | P04851.1 |
| | STRAIN | | | |
| | EDMONSTON | | | |
| 293 | BORDETELLA | IKLKDCP | 1176 | ACI16083.1 |
| | PERTUSSIS | | | |
| 294 | MEASLES VIRUS | IKLMPNITLLNNCTR | 1177 | P69353.1 |
| | STRAIN | | | |
| | EDMONSTON | | | |
| 295 | MEASLES | ILLERLDVGT | 1178 | AAF85664.1 |
| | MORBILLIVIRUS | | | |
| 296 | MEASLES | ILPGQDLQYV | 1179 | P08362.1 |
| | MORBILLIVIRUS | | | |
| 297 | MEASLES VIRUS | ILTYIAADHCPVVEV | 1180 | P69353.1 |
| | STRAIN | | | |
| | EDMONSTON | | | |
| 298 | MEASLES | INQDPDKILTY | 1181 | AAL29688.1 |
| | MORBILLIVIRUS | | | |
| 299 | MEASLES VIRUS | IPRFKVSPYLFNVPI | 1182 | P08362.1 |
| | STRAIN | | | |
| | EDMONSTON | | | |
| 300 | MEASLES VIRUS | IQALSYALGGDINKV | 1183 | P69353.1 |
| | STRAIN | | | |
| | EDMONSTON | | | |
| 301 | RUBELLA VIRUS | IRAGPYGHATVEMPE | 1184 | BAA28178.1 |
| 302 | BORDETELLA | IRMGTDK | 1185 | ACI16088.1 |
| | PERTUSSIS | | | |
| 303 | MEASLES VIRUS | ISNFDESSCTFMPEG | 1186 | P69353.1 |
| | STRAIN | | | |
| | EDMONSTON | | | |
| 304 | MEASLES VIRUS | ITAGIALHQSMLNSQ | 1187 | P69353.1 |
| | STRAIN | | | |
| | EDMONSTON | | | |
| 305 | MEASLES VIRUS | ITDDPDVSIRLLEVV | 1188 | P04851.1 |
| | STRAIN | | | |
| | EDMONSTON | | | |
| 306 | MEASLES VIRUS | ITDDPDVSIRLLEVVQSDQS | 1189 | P04851.1 |
| | STRAIN | | | |
| | EDMONSTON | | | |
| 307 | BORDETELLA | ITTYV | 1190 | ACI16083.1 |
| | PERTUSSIS | | | |
| 308 | MEASLES VIRUS | IVEAGLASFILTIKF | 1191 | P04851.1 |
| | STRAIN | | | |
| | EDMONSTON | | | |
| 309 | MEASLES VIRUS | IVEAGLASFILTIKFGIETM | 1192 | P04851.1 |
| | STRAIN | | | |
| | EDMONSTON | | | |
| 310 | MEASLES VIRUS | IVEAGLASFILTIKFGIETMYPALG | 1193 | P04851.1 |
| | STRAIN | | | |
| | EDMONSTON | | | |
| 311 | RUBELLA VIRUS | KALEAQSRALRAELAA | 1194 | P07566.1 |
| 312 | MEASLES VIRUS | KARITHVDTESYFIV | 1195 | P69353.1 |
| | STRAIN | | | |
| | EDMONSTON | | | |
| 313 | RUBELLA VIRUS | KCGLHIRAGPYGHAT | 1196 | BAA28178.1 |
| 314 | MEASLES VIRUS | KCYTTGTIINQDPDK | 1197 | P69353.1 |
| | STRAIN | | | |
| | EDMONSTON | | | |
| 315 | MEASLES VIRUS | KDNPHPKGSR | 1198 | P08362.1 |
| | STRAIN | | | |
| | EDMONSTON | | | |
| 316 | MEASLES VIRUS | KDNRIPSYGVLSVDL | 1199 | P08362.1 |
| | STRAIN | | | |
| | EDMONSTON | | | |
| 317 | MEASLES | KFLNPDREYDFRDLT | 1200 | AAC35876.2 |
| | MORBILLIVIRUS | | | |
| 318 | RUBELLA VIRUS | KFVTAALLN | 1201 | BAA28178.1 |
| 319 | MEASLES VIRUS | KGNCSGPTTIR | 1202 | P08362.1 |
| | STRAIN | | | |
| | EDMONSTON | | | |
| 320 | MEASLES | KIKFLNPDREYDFRD | 1203 | P06830.1 |
| | MORBILLIVIRUS | | | |
| 321 | RUBELLA VIRUS | KIVDGGCFAPWDLEA | 1204 | BAA28178.1 |
| 322 | MEASLES VIRUS | KLGLKLLRYYTEILS | 1205 | P69353.1 |
| | STRAIN | | | |
| | EDMONSTON | | | |
| 323 | MEASLES VIRUS | KLGVWKSPTDMQSWV | 1206 | P08362.1 |
| | STRAIN | | | |
| | EDMONSTON | | | |
| 324 | BORDETELLA | KLKECPQ | 1207 | ACI16088.1 |
| | PERTUSSIS | | | |
| 325 | MEASLES | KLLRYYTEI | 1208 | P26031.1 |
| | MORBILLIVIRUS | | | |
| 326 | MEASLES VIRUS | KLMPFSGDFV | 1209 | ABK40531.1 |
| | STRAIN | | | |
| | EDMONSTON | | | |
| 327 | MEASLES | KLMPNITLL | 1210 | P26031.1 |
| | MORBILLIVIRUS | | | |
| 328 | MEASLES | KLRMETCFQQACKGKIQALCENPEWA | 1211 | AAR89413.1 |
| | MORBILLIVIRUS | | | |
| 329 | MEASLES | KLWCRHFCV | 1212 | P08362.1 |
| | MORBILLIVIRUS | | | |
| 330 | MEASLES VIRUS | KLWCRHFCVL | 1213 | P08362.1 |
| | STRAIN | | | |
| | EDMONSTON | | | |
| 331 | MEASLES | KLWESPQEI | 1214 | BAB60863.1 |
| | MORBILLIVIRUS | | | |
| 332 | MEASLES VIRUS | KMSSAVGFV | 1215 | ABO69699.1 |
| | STRAIN | | | |
| | EDMONSTON | | | |
| 333 | MEASLES VIRUS | KMSSAVGFVPDTGPASR | 1216 | P03422.1 |
| | STRAIN | | | |
| | EDMONSTON-B | | | |
| 334 | BORDETELLA | KMVYATN | 1217 | ACI16083.1 |
| | PERTUSSIS | | | |
| 335 | MEASLES VIRUS | KPDLTGTSKSYVRSL | 1218 | P69353.1 |
| | STRAIN | | | |
| | EDMONSTON | | | |
| 336 | MEASLES | KPNLSSKRSELSQLS | 1219 | P08362.1 |
| | MORBILLIVIRUS | | | |
| 337 | MEASLES VIRUS | KPNLSSKRSELSQLSMYRVF | 1220 | P08362.1 |
| | STRAIN | | | |
| | EDMONSTON | | | |
| 338 | MEASLES VIRUS | KQSRGEARESYRETG | 1221 | P04851.1 |
| | STRAIN | | | |
| | EDMONSTON | | | |
| 339 | MEASLES VIRUS | KQSRGEARESYRETGPSRAS | 1222 | P04851.1 |
| | STRAIN | | | |
| | EDMONSTON | | | |
| 340 | MEASLES VIRUS | KRFAGVVLAGAALGV | 1223 | P69353.1 |
| | STRAIN | | | |
| | EDMONSTON | | | |
| 341 | MEASLES VIRUS | KRTPGNKPRIAEMIC | 1224 | P04851.1 |
| | STRAIN | | | |
| | EDMONSTON | | | |
| 342 | MEASLES VIRUS | KRTPGNKPRIAEMICDIDTY | 1225 | P04851.1 |
| | STRAIN | | | |
| | EDMONSTON | | | |
| 343 | MEASLES | KSNHNNVYWLTIPPMKNLALGVINTL | 1226 | AAR89413.1 |
| | MORBILLIVIRUS | | | |
| 344 | MEASLES | KVSPYLFNV | 1227 | P08362.1 |
| | MORBILLIVIRUS | | | |
| 345 | BORDETELLA | KVVQLPKISKNALKANG | 1228 | ACI16083.1 |
| | PERTUSSIS | | | |
| 346 | BORDETELLA | KVVQLPKISKNALRNDG | 1229 | ACI16087.1 |
| | PERTUSSIS | | | |
| 347 | BORDETELLA | LAHRRIPPENIR | 1230 | P04977.1 |
| | PERTUSSIS | | | |
| 348 | BORDETELLA | LALALWAGFALS | 1231 | P11092.1 |
| | PERTUSSIS | | | |
| 349 | RUBELLA VIRUS | LAPGGGNCHLTVNGE | 1232 | BAA28178.1 |
| 350 | MEASLES VIRUS | LAQIWVLLAKAVTAP | 1233 | P04851.1 |
| | STRAIN | | | |
| | EDMONSTON | | | |
| 351 | MEASLES VIRUS | LAQIWVLLAKAVTAPDTAAD | 1234 | P04851.1 |
| | STRAIN | | | |
| | EDMONSTON | | | |
| 352 | RUBELLA VIRUS | LASYFNPGGSYYKQYHPTACEVEPAFGHS | 1235 | BAA19893.1 |
| 353 | MEASLES | LAVSKGNCSGPTTIR | 1236 | P06830.1 |
| | MORBILLIVIRUS | | | |
| 354 | MEASLES VIRUS | LCENPEWAPLKDNRI | 1237 | P08362.1 |
| | STRAIN | | | |
| | EDMONSTON | | | |
| 355 | MEASLES | LDRLVRLIG | 1238 | ABI5411O.1 |
| | MORBILLIVIRUS | | | |
| 356 | CORYNEBACTERIUM | LEEEGVTPL | 1239 | P33120.2 |
| | DIPHTHERIAE | | | |
| 357 | BORDETELLA | LEHRMQEAVEAERAGRGTGHFI | 1240 | CAD44970.1 |
| | PERTUSSIS | | | |
| 358 | MEASLES VIRUS | LEKLGYSGGDLLGIL | 1241 | P69353.1 |
| | STRAIN | | | |
| | EDMONSTON | | | |
| 359 | MEASLES VIRUS | LEQPVSNDLS | 1242 | P08362.1 |
| | STRAIN | | | |
| | EDMONSTON | | | |
| 360 | MEASLES VIRUS | LERKWLDVVRNIIAE | 1243 | P04851.1 |
| | STRAIN | | | |
| | EDMONSTON | | | |
| 361 | MEASLES VIRUS | LERKWLDVVRNIIAEDLSLR | 1244 | P04851.1 |
| | STRAIN | | | |
| | EDMONSTON | | | |
| 362 | MEASLES VIRUS | LFGPSLRDPISAEIS | 1245 | P69353.1 |
| | STRAIN | | | |
| | EDMONSTON | | | |
| 363 | MEASLES | LGELKLAALCHGEDS | 1246 | P06830.1 |
| | MORBILLIVIRUS | | | |
| 364 | MEASLES VIRUS | LGGKEDRRVKQSR | 1247 | P04851.1 |
| | STRAIN | | | |
| | EDMONSTON | | | |
| 365 | RUBELLA VIRUS | LGHDGHHGGTLRVGQHHRNASDVL | 1248 | ABD64214.1 |
| 366 | RUBELLA VIRUS | LGSPNCHGPDWASPVCQRHS | 1249 | P07566.1 |
| | STRAIN THERIEN | | | |
| 367 | RUBELLA VIRUS | LGSPNCHGPDWASPVCQRHSPDCSRLV | 1250 | P07566.1 |
| | STRAIN THERIEN | | | |
| 368 | RUBELLA VIRUS | LHDPDTEAPTEACVTSWL | 1251 | ABD64214.1 |
| 369 | MEASLES VIRUS | LIANCASILCKCYTT | 1252 | P69353.1 |
| | STRAIN | | | |
| | EDMONSTON | | | |
| 370 | MEASLES | LIGLLAIAGIRLHRAAIYTAEIHK | 1253 | AAR89413.1 |
| | MORBILLIVIRUS | | | |
| 371 | MEASLES VIRUS | LIPSMNQLSCDLIGQ | 1254 | P69353.1 |
| | STRAIN | | | |
| | EDMONSTON | | | |
| 372 | MEASLES VIRUS | LKIKIASGFGPLITH | 1255 | P08362.1 |
| | STRAIN | | | |
| | EDMONSTON | | | |
| 373 | MEASLES | LKIKIASGFGPLITHGSGMDLYK | 1256 | AAR89413.1 |
| | MORBILLIVIRUS | | | |
| 374 | BORDETELLA | LKLYFEP | 1257 | ACI16088.1 |
| | PERTUSSIS | | | |
| 375 | MEASLES VIRUS | LLAVLFVMFL | 1258 | P08362.1 |
| | STRAIN | | | |
| | EDMONSTON | | | |
| 376 | MEASLES VIRUS | LLDRLVRLIGNPDVS | 1259 | P04851.1 |
| | STRAIN | | | |
| | EDMONSTON | | | |
| 377 | MEASLES VIRUS | LLDRLVRLIGNPDVSGPKLT | 1260 | P04851.1 |
| | STRAIN | | | |
| | EDMONSTON | | | |
| 378 | MEASLES VIRUS | LLESSDQILRSMKGL | 1261 | P69353.1 |
| | STRAIN | | | |
| | EDMONSTON | | | |
| 379 | MEASLES | LLETRTTNQFLAVSK | 1262 | P06830.1 |
| | MORBILLIVIRUS | | | |
| 380 | MEASLES VIRUS | LLEVVQSDQSQSGLT | 1263 | P04851.1 |
| | STRAIN | | | |
| | EDMONSTON | | | |
| 381 | MEASLES VIRUS | LLEVVQSDQSQSGLTFASR | 1264 | P04851.1 |
| | STRAIN | | | |
| | EDMONSTON | | | |
| 382 | MEASLES VIRUS | LLEVVQSDQSQSGLTFASRG | 1265 | P04851.1 |
| | STRAIN | | | |
| | EDMONSTON | | | |
| 383 | MEASLES | LLGILESRGIKARIT | 1266 | AAL29688.1 |
| | MORBILLIVIRUS | | | |
| 384 | RUBELLA VIRUS | LLRTAPGP | 1267 | CAJ88851.1 |
| 385 | MEASLES VIRUS | LLRYYTEILSLFGPS | 1268 | P69353.1 |
| | STRAIN | | | |
| | EDMONSTON | | | |
| 386 | RUBELLA VIRUS | LLVPWVLIFMVCRRACRRRG | 1269 | P07566.1 |
| | STRAIN THERIEN | | | |
| 387 | MEASLES VIRUS | LLWRSRCKIV | 1270 | ABK40528.1 |
| | STRAIN | | | |
| | EDMONSTON | | | |
| 388 | MEASLES | LLWSYAMGV | 1271 | P04851.1 |
| | MORBILLIVIRUS | | | |
| 389 | MEASLES VIRUS | LLWSYAMGVGVELEN | 1272 | P04851.1 |
| | STRAIN | | | |
| | EDMONSTON | | | |
| 390 | MEASLES VIRUS | LLWSYAMGVGVELENSMGGL | 1273 | P04851.1 |
| | STRAIN | | | |
| | EDMONSTON | | | |
| 391 | MEASLES | LMIDRPYVL | 1274 | P08362.1 |
| | MORBILLIVIRUS | | | |
| 392 | MEASLES VIRUS | LNAMTQNIRPVQSVA | 1275 | P69353.1 |
| | STRAIN | | | |
| | EDMONSTON | | | |
| 393 | RUBELLA VIRUS | LNTPPPYQVSCGGES | 1276 | BAA28178.1 |
| 394 | MEASLES VIRUS | LRDPISAEISIQALS | 1277 | P69353.1 |
| | STRAIN | | | |
| | EDMONSTON | | | |
| 395 | BORDETELLA | LRGSGDLQEYLRHVTR | 1278 | AAA83981.1 |
| | PERTUSSIS | | | |
| 396 | RUBELLA VIRUS | LRLVDADD | 1279 | CAJ88851.1 |
| 397 | RUBELLA VIRUS | LRLVDADDPLLR | 1280 | BAA19893.1 |
| 398 | RUBELLA VIRUS | LRLVDADDPLLRTAPGPGEVWVTPVIGSQA | 1281 | BAA19893.1 |
| | | R | | |
| 399 | BORDETELLA | LRRLLYMIYMSGLAVRVHVSKEEQYYDY | 1282 | P04979.1 |
| | PERTUSSIS | | | |
| 400 | RUBELLA VIRUS | LRTAPGPG | 1283 | CAJ88851.1 |
| 401 | RUBELLA VIRUS | LRVGQHYRNASDVLPGHWLQ | 1284 | NP_740663.1 |
| 402 | BORDETELLA | LRYLA | 1285 | ACI16088.1 |
| | PERTUSSIS | | | |
| 403 | MEASLES VIRUS | LSCKPWQESRKNK | 1286 | P04851.1 |
| | STRAIN | | | |
| | EDMONSTON | | | |
| 404 | MEASLES | LSEIKGVIVHRLEGV | 1287 | AAL29688.1 |
| | MORBILLIVIRUS | | | |
| 405 | MEASLES VIRUS | LSIAYPTLSEIKGVI | 1288 | P69353.1 |
| | STRAIN | | | |
| | EDMONSTON | | | |
| 406 | MEASLES VIRUS | LSLLDLYLGRGYNVS | 1289 | P08362.1 |
| | STRAIN | | | |
| | EDMONSTON | | | |
| 407 | MEASLES VIRUS | LSQGNLIANCASILC | 1290 | P69353.1 |
| | STRAIN | | | |
| | EDMONSTON | | | |
| 408 | MEASLES | LSSHRGVIADNQAKW | 1291 | P06830.1 |
| | MORBILLIVIRUS | | | |
| 409 | MEASLES VIRUS | LSVDLSLTVELKIKI | 1292 | P08362.1 |
| | STRAIN | | | |
| | EDMONSTON | | | |
| 410 | BORDETELLA | LTGISICNPGSSLC | 1293 | AAA83981.1 |
| | PERTUSSIS | | | |
| 411 | MEASLES VIRUS | LTIKFGIETMYPALG | 1294 | P04851.1 |
| | STRAIN | | | |
| | EDMONSTON | | | |
| 412 | MEASLES VIRUS | LTIKFGIETMYPALGLHEFA | 1295 | P04851.1 |
| | STRAIN | | | |
| | EDMONSTON | | | |
| 413 | MEASLES VIRUS | LTLQTPTGQIHWGNL | 1296 | P69353.1 |
| | STRAIN | | | |
| | EDMONSTON | | | |
| 414 | RUBELLA VIRUS | LVD ADDPL | 1297 | CAJ88851.1 |
| 415 | RUBELLA VIRUS | LVDADDPLLR | 1298 | BAA19893.1 |
| 416 | MEASLES VIRUS | LVEKPNLSSKRSELS | 1299 | P08362.1 |
| | STRAIN | | | |
| | EDMONSTON | | | |
| 417 | RUBELLA VIRUS | LVGATPE | 1300 | BAA19893.1 |
| 418 | RUBELLA VIRUS | LVGATPER | 1301 | CAJ88851.1 |
| 419 | MEASLES | LVKLGVWKSPTGMQS | 1302 | P06830.1 |
| | MORBILLIVIRUS | | | |
| 420 | MEASLES VIRUS | LVSGSFGNRFILSQGNLI | 1303 | P26031.1 |
| | STRAIN | | | |
| | EDMONSTON-B | | | |
| 421 | MEASLES VIRUS | LYKSNHNNVYWLTIP | 1304 | P08362.1 |
| | STRAIN | | | |
| | EDMONSTON | | | |
| 422 | MEASLES VIRUS | LYPMSPLLQECLRGSTKSCARTLVS | 1305 | P69353.1 |
| | STRAIN | | | |
| | EDMONSTON | | | |
| 423 | RUBELLA VIRUS | MASTTPITMEDLQKALEA | 1306 | P07566.1 |
| 424 | RUBELLA VIRUS | MASTTPITMEDLQKALEAQSR | 1307 | ABD64200.1 |
| 425 | RUBELLA VIRUS | MASTTPITMEDLQKALEAQSRALRAELAA | 1308 | P07566.1 |
| | STRAIN THERIEN | | | |
| 426 | RUBELLA VIRUS | MASTTPITMEDLQKALEAQSRALRAGLAA | 1309 | ABD64200.1 |
| 427 | RUBELLA VIRUS | MASTTPITMEDLQKALETQSRVLRAGLTA | 1310 | CAA33016.1 |
| | VACCINE STRAIN | | | |
| | RA27/3 | | | |
| 428 | MEASLES VIRUS | MATLLRSLALFKRNK | 1311 | P04851.1 |
| | STRAIN | | | |
| | EDMONSTON | | | |
| 429 | MEASLES VIRUS | MATLLRSLALFKRNKDKPPI | 1312 | P04851.1 |
| | STRAIN | | | |
| | EDMONSTON | | | |
| 430 | MEASLES | MDLYKSNHNNVYWLT | 1313 | P06830.1 |
| | MORBILLIVIRUS | | | |
| 431 | RUBELLA VIRUS | MEDLQKALEAQSRA | 1314 | P07566.1 |
| 432 | RUBELLA VIRUS | MEDLQKALEAQSRALRAELAA | 1315 | P07566.1 |
| 433 | MEASLES VIRUS | MGLKVNVSAIFMAVL | 1316 | P69353.1 |
| | STRAIN | | | |
| | EDMONSTON | | | |
| 434 | MEASLES | MIDRPYVLLAVLFVM | 1317 | P06830.1 |
| | MORBILLIVIRUS | | | |
| 435 | MEASLES VIRUS | MILAVQGVQDYINNE | 1318 | P69353.1 |
| | STRAIN | | | |
| | EDMONSTON | | | |
| 436 | MEASLES VIRUS | MLNSQAIDNLRASLE | 1319 | P69353.1 |
| | STRAIN | | | |
| | EDMONSTON | | | |
| 437 | MEASLES VIRUS | MNALVNSTLLETRTT | 1320 | P08362.1 |
| | STRAIN | | | |
| | EDMONSTON | | | |
| 438 | RUBELLA VIRUS | MNYTGNQQSRWGLGSPNCHGPDWASPVCQR | 1321 | BAA19893.1 |
| | | HS | | |
| 439 | MEASLES VIRUS | MQSWVPLSTDDPVID | 1322 | P08362.1 |
| | STRAIN | | | |
| | EDMONSTON | | | |
| 440 | MEASLES | MSLSLLDLYLGRGYN | 1323 | P06830.1 |
| | MORBILLIVIRUS | | | |
| 441 | MEASLES VIRUS | MSPLLQECLRGSTKS | 1324 | P69353.1 |
| | STRAIN | | | |
| | EDMONSTON | | | |
| 442 | MEASLES | MSPQRDRINAFYKDN | 1325 | P06830.1 |
| | MORBILLIVIRUS | | | |
| 443 | MEASLES | MYRVFEVSVIRNPGL | 1326 | P06830.1 |
| | MORBILLIVIRUS | | | |
| 444 | MEASLES VIRUS | NALYPMSPLLQECLR | 1327 | P69353.1 |
| | STRAIN | | | |
| | EDMONSTON | | | |
| 445 | RUBELLA VIRUS | NCHGPDWASPVCQRHSPDCSRLVGAT | 1328 | P07566.1 |
| | STRAIN THERIEN | | | |
| 446 | MEASLES VIRUS | NFGRSYFDPAYFRLG | 1329 | P04851.1 |
| | STRAIN | | | |
| | EDMONSTON | | | |
| 447 | MEASLES VIRUS | NFGRSYFDPAYFRLGQEMVR | 1330 | P04851.1 |
| | STRAIN | | | |
| | EDMONSTON | | | |
| 448 | RUBELLA VIRUS | NGTQRACTFWAVNAY | 1331 | BAA28178.1 |
| 449 | MEASLES VIRUS | NGVTIQVGSRRYPDA | 1332 | P69353.1 |
| | STRAIN | | | |
| | EDMONSTON | | | |
| 450 | MEASLES VIRUS | NIIAEDLSLRRFMVA | 1333 | P04851.1 |
| | STRAIN | | | |
| | EDMONSTON | | | |
| 451 | MEASLES VIRUS | NIIAEDLSLRRFMVALILDI | 1334 | P04851.1 |
| | STRAIN | | | |
| | EDMONSTON | | | |
| 452 | MEASLES VIRUS | NITLLNNCTRVEIAE | 1335 | P69353.1 |
| | STRAIN | | | |
| | EDMONSTON | | | |
| 453 | MEASLES | NLALGVINTLEWIPR | 1336 | P06830.1 |
| | MORBILLIVIRUS | | | |
| 454 | CORYNEBACTERIUM | NLFQVVHWSYNRPAYSPG | 1337 | SRC280292 |
| | DIPHTHERIAE | | | |
| 455 | MEASLES VIRUS | NLVILPGQDLQYVLA | 1338 | P08362.1 |
| | STRAIN | | | |
| | EDMONSTON | | | |
| 456 | MEASLES VIRUS | NLYQQMGKPAPYMVN | 1339 | P04851.1 |
| | STRAIN | | | |
| | EDMONSTON | | | |
| 457 | MEASLES VIRUS | NLYQQMGKPAPYMVNLENSI | 1340 | P04851.1 |
| | STRAIN | | | |
| | EDMONSTON | | | |
| 458 | MEASLES VIRUS | NNCTRVEIAEYRRLL | 1341 | P69353.1 |
| | STRAIN | | | |
| | EDMONSTON | | | |
| 459 | MEASLES VIRUS | NPDREYDFRD | 1342 | P08362.1 |
| | STRAIN | | | |
| | EDMONSTON | | | |
| 460 | MEASLES VIRUS | NPDVSGPKL | 1343 | P10050.1 |
| | STRAIN HALLE | | | |
| 461 | MEASLES VIRUS | NPDVSGPKLTGALIG | 1344 | P04851.1 |
| | STRAIN | | | |
| | EDMONSTON | | | |
| 462 | MEASLES VIRUS | NPDVSGPKLTGALIGILSLF | 1345 | P04851.1 |
| | STRAIN | | | |
| | EDMONSTON | | | |
| 463 | MEASLES | NPPERIKLDYDQYCA | 1346 | P06830.1 |
| | MORBILLIVIRUS | | | |
| 464 | MEASLES | NQAKWAVPTTRTDDK | 1347 | P06830.1 |
| | MORBILLIVIRUS | | | |
| 465 | MEASLES | NQDPDKILTYIAADH | 1348 | AAF02706.1 |
| | MORBILLIVIRUS | | | |
| 466 | MEASLES VIRUS | NQLSCDLIGQKLGLK | 1349 | P69353.1 |
| | STRAIN | | | |
| | EDMONSTON | | | |
| 467 | RUBELLA VIRUS | NQQSRWGLGSPNCHGPDWASPVCQRHS | 1350 | ABD64214.1 |
| 468 | MUMPS | NSTLGVKSAREF | 1351 | ABP48111.1 |
| | RUBULAVIRUS | | | |
| 469 | RUBELLA VIRUS | NTPHGQLEVQVPPDP | 1352 | BAA28178.1 |
| 470 | MEASLES VIRUS | NVSAIFMAVLLTLQT | 1353 | P69353.1 |
| | STRAIN | | | |
| | EDMONSTON | | | |
| 471 | MEASLES | PAEVDGDVKLSSNLV | 1354 | P06830.1 |
| | MORBILLIVIRUS | | | |
| 472 | RUBELLA VIRUS | PAFGHSDAACWGFPT | 1355 | BAA28178.1 |
| 473 | MEASLES VIRUS | PALICCCRGRCNKKG | 1356 | P69353.1 |
| | STRAIN | | | |
| | EDMONSTON | | | |
| 474 | MEASLES | PDKILTYIAADHC | 1357 | AAF02706.1 |
| | MORBILLIVIRUS | | | |
| 475 | MEASLES VIRUS | PERIKLDYDQYCADV | 1358 | P08362.1 |
| | STRAIN | | | |
| | EDMONSTON | | | |
| 476 | RUBELLA VIRUS | PERPRLRL | 1359 | CAJ88851.1 |
| 477 | RUBELLA VIRUS | PGCATQAPVPVRLAG | 1360 | BAA28178.1 |
| 478 | RUBELLA VIRUS | PGCATQAPVPVRLAGVRFESKIVDGGCFA | 1361 | CAJ88851.1 |
| | VACCINE STRAIN | | | |
| | RA27/3 | | | |
| 479 | RUBELLA VIRUS | PGEVWVTP | 1362 | CAJ88851.1 |
| 480 | RUBELLA VIRUS | PGEVWVTPVIGSQAR | 1363 | BAA28178.1 |
| 481 | CORYNEBACTERIUM | PGKLDVNKSKTHISVN | 1364 | CAE11230.1 |
| | DIPHTHERIAE | | | |
| 482 | MEASLES VIRUS | PGLGAPVFHMTNYLE | 1365 | P08362.1 |
| | STRAIN | | | |
| | EDMONSTON | | | |
| 483 | RUBELLA VIRUS | PGPGEVWV | 1366 | CAJ88851.1 |
| 484 | RUBELLA VIRUS | PHKTVRVKFHTETRT | 1367 | BAA28178.1 |
| 485 | MEASLES | PIELQVECFTWDQKL | 1368 | AAR89413.1 |
| | MORBILLIVIRUS | | | |
| 486 | MEASLES VIRUS | PISLERLDVG | 1369 | P26031.1 |
| | STRAIN | | | |
| | EDMONSTON-B | | | |
| 487 | MEASLES VIRUS | PISLERLDVGTNLGN | 1370 | P69353.1 |
| | STRAIN | | | |
| | EDMONSTON | | | |
| 488 | BORDETELLA | PKALFTQQGGAYGRC | 1371 | P04979.1 |
| | PERTUSSIS | | | |
| 489 | MEASLES VIRUS | PKYVATQGYLISNFD | 1372 | P69353.1 |
| | STRAIN | | | |
| | EDMONSTON | | | |
| 490 | MEASLES VIRUS | PLDIDTASESSQD | 1373 | P04851.1 |
| | STRAIN | | | |
| | EDMONSTON | | | |
| 491 | RUBELLA VIRUS | PLGLKFKTVRPVALP | 1374 | BAA28178.1 |
| 492 | MEASLES VIRUS | PLITHGSGMDLYKSN | 1375 | P08362.1 |
| | STRAIN | | | |
| | EDMONSTON | | | |
| 493 | MEASLES | PLKDNRIPSYGVLSV | 1376 | P06830.1 |
| | MORBILLIVIRUS | | | |
| 494 | RUBELLA VIRUS | PLLRTAPG | 1377 | CAJ88851.1 |
| 495 | MEASLES VIRUS | PLLSCKPWQESRK | 1378 | P04851.1 |
| | STRAIN | | | |
| | EDMONSTON | | | |
| 496 | BORDETELLA | PPATVYRYDSRPPE | 1379 | P04977.1 |
| | PERTUSSIS | | | |
| 497 | MEASLES | PPISLERLDVGT | 1380 | AAL29688.1 |
| | MORBILLIVIRUS | | | |
| 498 | RUBELLA VIRUS | PPPPEERQETRSQTPAPKPS | 1381 | P07566.1 |
| 499 | BORDETELLA | PQEQITQHGSPYGRC | 1382 | AAA83981.1 |
| | PERTUSSIS | | | |
| 500 | BORDETELLA | PQEQITQHGSPYGRCANK | 1383 | AAA83981.1 |
| | PERTUSSIS | | | |
| 501 | BORDETELLA | PQPGPQPPQPPQPQPEAPAPQPPAG | 1384 | P14283.3 |
| | PERTUSSIS | | | |
| 502 | MEASLES VIRUS | PRLGGKEDRRVKQ | 1385 | P04851.1 |
| | STRAIN | | | |
| | EDMONSTON | | | |
| 503 | RUBELLA VIRUS | PRLRLVDA | 1386 | CAJ88851.1 |
| 504 | RUBELLA VIRUS | PRNVRVTGCYQCGTP | 1387 | BAA28178.1 |
| 505 | MEASLES VIRUS | PSRASDARAAHLP | 1388 | P04851.1 |
| | STRAIN | | | |
| | EDMONSTON | | | |
| 506 | MEASLES VIRUS | PTGQIHWGNLSKIGV | 1389 | P69353.1 |
| | STRAIN | | | |
| | EDMONSTON | | | |
| 507 | MEASLES VIRUS | PTGTPLDIDTASE | 1390 | P04851.1 |
| | STRAIN | | | |
| | EDMONSTON | | | |
| 508 | MEASLES VIRUS | PTLSEIKGVIVHRLE | 1391 | P69353.1 |
| | STRAIN | | | |
| | EDMONSTON | | | |
| 509 | MEASLES | PTTIRGQFSNMSLSL | 1392 | P06830.1 |
| | MORBILLIVIRUS | | | |
| 510 | MEASLES | PTTRTDDKLR | 1393 | AAR89413.1 |
| | MORBILLIVIRUS | | | |
| 511 | MEASLES | PTTRTDDKLRMETCFQQACKG | 1394 | AAR89413.1 |
| | MORBILLIVIRUS | | | |
| 512 | RUBELLA VIRUS | PVALPRTLAPPRNVR | 1395 | BAA28178.1 |
| 513 | CORYNEBACTERIUM | PVFAGANYAAWAVNVAQVI | 1396 | AAV70486.1 |
| | DIPHTHERIAE | | | |
| 514 | RUBELLA VIRUS | PVIGSQAR | 1397 | CAJ88851.1 |
| 515 | MEASLES | PVVEVNGVTIQVGSR | 1398 | AAL29688.1 |
| | MORBILLIVIRUS | | | |
| 516 | RUBELLA VIRUS | PWELVVLTARPEDGWTCRGV | 1399 | P07566.1 |
| | STRAIN THERIEN | | | |
| 517 | MEASLES VIRUS | PWQESRKNKAQTR | 1400 | P04851.1 |
| | STRAIN | | | |
| | EDMONSTON | | | |
| 518 | MEASLES VIRUS | PYMVNLENSIQNKFS | 1401 | P04851.1 |
| | STRAIN | | | |
| | EDMONSTON | | | |
| 519 | MEASLES VIRUS | PYMVNLENSIQNKFSAGSYP | 1402 | P04851.1 |
| | STRAIN | | | |
| | EDMONSTON | | | |
| 520 | MEASLES VIRUS | PYQGSGKGVS | 1403 | P08362.1 |
| | STRAIN | | | |
| | EDMONSTON | | | |
| 521 | RUBELLA VIRUS | PYQVSCGGESDRASA | 1404 | BAA28178.1 |
| 522 | MEASLES | QACKGKIQALCEN | 1405 | P08362.1 |
| | MORBILLIVIRUS | | | |
| 523 | MEASLES VIRUS | QAGQEMILAVQGVQD | 1406 | P69353.1 |
| | STRAIN | | | |
| | EDMONSTON | | | |
| 524 | MEASLES | QALCENPECVPLKDN | 1407 | P06830.1 |
| | MORBILLIVIRUS | | | |
| 525 | BORDETELLA | QALGALK | 1408 | ACI16088.1 |
| | PERTUSSIS | | | |
| 526 | RUBELLA VIRUS | QAPVPVRLAGVRFES | 1409 | BAA28178.1 |
| 527 | RUBELLA VIRUS | QCGTPALVEGLAPGG | 1410 | BAA28178.1 |
| 528 | MEASLES VIRUS | QDPDKILTYIAADHC | 1411 | P69353.1 |
| | STRAIN | | | |
| | EDMONSTON | | | |
| 529 | MEASLES VIRUS | QECLRGSTKSCARTL | 1412 | P69353.1 |
| | STRAIN | | | |
| | EDMONSTON | | | |
| 530 | BORDETELLA | QEQITQHGSPYGRC | 1413 | AAA83981.1 |
| | PERTUSSIS | | | |
| 531 | MEASLES VIRUS | QESRKNKAQTRTP | 1414 | P04851.1 |
| | STRAIN | | | |
| | EDMONSTON | | | |
| 532 | MEASLES VIRUS | QGDQSENELPRLGGK | 1415 | P04851.1 |
| | STRAIN | | | |
| | EDMONSTON | | | |
| 533 | MEASLES VIRUS | QGDQSENELPRLGGKEDRRV | 1416 | P04851.1 |
| | STRAIN | | | |
| | EDMONSTON | | | |
| 534 | CORYNEBACTERIUM | QGESGHDIKITAENTPLPIA | 1417 | AAV70486.1 |
| | DIPHTHERIAE | | | |
| 535 | MEASLES | QGSGKGVSFQLVKLG | 1418 | P06830.1 |
| | MORBILLIVIRUS | | | |
| 536 | MEASLES VIRUS | QGVQDYINNELIPSM | 1419 | P69353.1 |
| | STRAIN | | | |
| | EDMONSTON | | | |
| 537 | RUBELLA VIRUS | QLEVQVPPDPGDLVE | 1420 | BAA28178.1 |
| 538 | MEASLES | QLPEATFMV | 1421 | ABK40528.1 |
| | MORBILLIVIRUS | | | |
| 539 | RUBELLA VIRUS | QLPFLGHDGHHGGTLRVGQHYRNAS | 1422 | NP_740663.1 |
| 540 | MEASLES VIRUS | QLSMYRVFEV | 1423 | P08362.1 |
| | STRAIN | | | |
| | EDMONSTON | | | |
| 541 | BORDETELLA | QLSNIT | 1424 | ACI16083.1 |
| | PERTUSSIS | | | |
| 542 | MEASLES VIRUS | QNIRPVQSVASSRRH | 1425 | P69353.1 |
| | STRAIN | | | |
| | EDMONSTON | | | |
| 543 | MEASLES VIRUS | QNKFSAGSYPLLWSY | 1426 | P04851.1 |
| | STRAIN | | | |
| | EDMONSTON | | | |
| 544 | MEASLES VIRUS | QNKFSAGSYPLLWSYAMGVG | 1427 | P04851.1 |
| | STRAIN | | | |
| | EDMONSTON | | | |
| 545 | MEASLES VIRUS | QNKFSAGSYPLLWSYAMGVGVELEN | 1428 | P04851.1 |
| | STRAIN | | | |
| | EDMONSTON | | | |
| 546 | MEASLES VIRUS | QQACKGKIQALCENP | 1429 | P08362.1 |
| | STRAIN | | | |
| | EDMONSTON | | | |
| 547 | MEASLES VIRUS | QQRRVVGEFRLERKW | 1430 | P04851.1 |
| | STRAIN | | | |
| | EDMONSTON | | | |
| 548 | MEASLES VIRUS | QQRRVVGEFRLERKWLDVVR | 1431 | P04851.1 |
| | STRAIN | | | |
| | EDMONSTON | | | |
| 549 | BORDETELLA | QQTRANPNPYTSRRSVAS | 1432 | P04977.1 |
| | PERTUSSIS | | | |
| 550 | RUBELLA VIRUS | QRHSPDCSRLVGATP | 1433 | BAA28178.1 |
| 551 | MEASLES VIRUS | QSGLTFASRGTNMED | 1434 | P04851.1 |
| | STRAIN | | | |
| | EDMONSTON | | | |
| 552 | MEASLES VIRUS | QSGLTFASRGTNMEDEADQY | 1435 | P04851.1 |
| | STRAIN | | | |
| | EDMONSTON | | | |
| 553 | CORYNEBACTERIUM | QSIALSSLMVAQAIPLVGEL | 1436 | AAV70486.1 |
| | DIPHTHERIAE | | | |
| 554 | MEASLES VIRUS | QSRFGWFENKEISDI | 1437 | P04851.1 |
| | STRAIN | | | |
| | EDMONSTON | | | |
| 555 | MEASLES VIRUS | QSRFGWFENKEISDIEVQDP | 1438 | P04851.1 |
| | STRAIN | | | |
| | EDMONSTON | | | |
| 556 | MEASLES VIRUS | QSRGEAR | 1439 | P04851.1 |
| | STRAIN | | | |
| | EDMONSTON | | | |
| 557 | MEASLES VIRUS | QSRGEARESYRETGPSRA | 1440 | P04851.1 |
| | STRAIN | | | |
| | EDMONSTON | | | |
| 558 | RUBELLA VIRUS | QTGRGGSAPRPELGPPTN | 1441 | P07566.1 |
| | STRAIN THERIEN | | | |
| 559 | RUBELLA VIRUS | QTPAPKPSRAPPQQPQPPRMQTGRG | 1442 | P07566.1 |
| | STRAIN THERIEN | | | |
| 560 | MEASLES VIRUS | QVGSRRYPDAVYLHR | 1443 | P69353.1 |
| | STRAIN | | | |
| | EDMONSTON | | | |
| 561 | MEASLES VIRUS | QVSFLQGDQSENE | 1444 | P04851.1 |
| | STRAIN | | | |
| | EDMONSTON | | | |
| 562 | RUBELLA VIRUS | QYHPTACEVEPAFGH | 1445 | BAA28178.1 |
| 563 | MEASLES VIRUS | QYVLATYDTSRVEHA | 1446 | P08362.1 |
| | STRAIN | | | |
| | EDMONSTON | | | |
| 564 | BORDETELLA | RANPNPYTSRRSV | 1447 | ACI04548.1 |
| | PERTUSSIS | | | |
| 565 | MEASLES VIRUS | RASDARAAHLPTG | 1448 | P04851.1 |
| | STRAIN | | | |
| | EDMONSTON | | | |
| 566 | MEASLES VIRUS | RASLETTNQAIEAIR | 1449 | P69353.1 |
| | STRAIN | | | |
| | EDMONSTON | | | |
| 567 | RUBELLA VIRUS | RCGRLICGLSTTAQYPPTRF | 1450 | P07566.1 |
| | STRAIN THERIEN | | | |
| 568 | BORDETELLA | RDGQSVIGACASPYEGRYR | 1451 | P04979.1 |
| | PERTUSSIS | | | |
| 569 | MEASLES VIRUS | RESYRETGPSRAS | 1452 | P04851.1 |
| | STRAIN | | | |
| | EDMONSTON | | | |
| 570 | MEASLES VIRUS | RETGPSRASDARA | 1453 | P04851.1 |
| | STRAIN | | | |
| | EDMONSTON | | | |
| 571 | MUMPS | RFAKYQQQGRLEAR | 1454 | P21186.1 |
| | RUBULAVIRUS | | | |
| 572 | RUBELLA VIRUS | RFGAPQAFLAGLLLATVAVGTARA | 1455 | P07566.1 |
| | STRAIN THERIEN | | | |
| 573 | MEASLES VIRUS | RFMVALILDIKRTPG | 1456 | P04851.1 |
| | STRAIN | | | |
| | EDMONSTON | | | |
| 574 | MEASLES VIRUS | RFMVALILDIKRTPGNKPRI | 1457 | P04851.1 |
| | STRAIN | | | |
| | EDMONSTON | | | |
| 575 | MEASLES VIRUS | RGEARESYRETGP | 1458 | P04851.1 |
| | STRAIN | | | |
| | EDMONSTON | | | |
| 576 | RUBELLA VIRUS | RGTTPPAYG | 1459 | CAA28880.1 |
| 577 | RUBELLA VIRUS | RIETRSARH | 1460 | ABD64214.1 |
| | STRAIN M33 | | | |
| 578 | BORDETELLA | RILAGALATYQ | 1461 | P04977.1 |
| | PERTUSSIS | | | |
| 579 | BORDETELLA | RIPPENIRRVT | 1462 | ACI04548.1 |
| | PERTUSSIS | | | |
| 580 | BORDETELLA | RISNLND | 1463 | ACI16083.1 |
| | PERTUSSIS | | | |
| 581 | BORDETELLA | RLANLNG | 1464 | ACI16088.1 |
| | PERTUSSIS | | | |
| 582 | MEASLES VIRUS | RLDVGTNLGNAIAKL | 1465 | P69353.1 |
| | STRAIN | | | |
| | EDMONSTON | | | |
| 583 | MEASLES VIRUS | RLERKWLDV | 1466 | P04851.1 |
| | STRAIN | | | |
| | EDMONSTON | | | |
| 584 | MEASLES VIRUS | RLGGKEDRRVKQSRG | 1467 | P04851.1 |
| | STRAIN | | | |
| | EDMONSTON | | | |
| 585 | MEASLES VIRUS | RLGGKEDRRVKQSRGEARES | 1468 | P04851.1 |
| | STRAIN | | | |
| | EDMONSTON | | | |
| 586 | MEASLES VIRUS | RLLDRLVRL | 1469 | ABI54110.1 |
| | STRAIN | | | |
| | EDMONSTON | | | |
| 587 | RUBELLA VIRUS | RLRLVDAD | 1470 | CAJ88851.1 |
| 588 | RUBELLA VIRUS | RLRLVDADDPLLR | 1471 | BAA19893.1 |
| 589 | RUBELLA VIRUS | RLRLVDADDPLLRTAPGPGEVWVTPVIGSQ | 1472 | BAA19893.1 |
| | | A | | |
| 590 | RUBELLA VIRUS | RLRLVQDADDPLLRIAPGPGEVWVTPVIGS | 1473 | SRC265968 |
| | | QA | | |
| 591 | MEASLES VIRUS | RLSDNGYYTV | 1474 | ABK40528.1 |
| | STRAIN | | | |
| | EDMONSTON | | | |
| 592 | RUBELLA VIRUS | RLVDADDP | 1475 | CAJ88851.1 |
| 593 | RUBELLA VIRUS | RLVDADDPLLRTAPG | 1476 | BAA28178.1 |
| 594 | RUBELLA VIRUS | RLVGATPE | 1477 | CAJ88851.1 |
| 595 | RUBELLA VIRUS | RMQTGRGGSAPRPELGPPTNPFQAAVA | 1478 | ABD64216.1 |
| 596 | MEASLES | RMSKGVFKV | 1479 | ABY21184.1 |
| | MORBILLIVIRUS | | | |
| 597 | MEASLES | RNPGLGAPVFHMTNY | 1480 | P06830.1 |
| | MORBILLIVIRUS | | | |
| 598 | RUBELLA VIRUS | RPRLRLVD | 1481 | CAJ88851.1 |
| 599 | BORDETELLA | RQAESSEAMAAWSERAGEA | 1482 | P04977.1 |
| | PERTUSSIS | | | |
| 600 | RUBELLA VIRUS | RQTWAEWAAAHWWQL | 1483 | BAA28178.1 |
| 601 | MEASLES VIRUS | RRVKQSRGEARES | 1484 | P04851.1 |
| | STRAIN | | | |
| | EDMONSTON | | | |
| 602 | MEASLES | RRYPDAVYL | 1485 | ACA09725.1 |
| | MORBILLIVIRUS | | | |
| 603 | MEASLES VIRUS | RRYPDAVYLHRIDLG | 1486 | P69353.1 |
| | STRAIN | | | |
| | EDMONSTON | | | |
| 604 | MEASLES VIRUS | RSAGKVSSTLASELG | 1487 | P04851.1 |
| | STRAIN | | | |
| | EDMONSTON | | | |
| 605 | MEASLES VIRUS | RSAGKVSSTLASELGITAED | 1488 | P04851.1 |
| | STRAIN | | | |
| | EDMONSTON | | | |
| 606 | MEASLES VIRUS | RSELSQLS | 1489 | P08362.1 |
| | STRAIN | | | |
| | EDMONSTON | | | |
| 607 | MEASLES VIRUS | RSELSQLSMYRVFEV | 1490 | P08362.1 |
| | STRAIN | | | |
| | EDMONSTON | | | |
| 608 | RUBELLA VIRUS | RSQTPAPKPSRAPPQQPQPPRMQT | 1491 | ABD64214.1 |
| 609 | RUBELLA VIRUS | RTAPGPGE | 1492 | CAJ88851.1 |
| 610 | RUBELLA VIRUS | RTAPGPGEVWVTPVI | 1493 | BAA28178.1 |
| 611 | MEASLES | RTDDKLRMETCFQQA | 1494 | P06830.1 |
| | MORBILLIVIRUS | | | |
| 612 | RUBELLA VIRUS | RTLAPPRNVRVTGCY | 1495 | BAA28178.1 |
| 613 | MEASLES VIRUS | RTVLEPIRDALNAMT | 1496 | P69353.1 |
| | STRAIN | | | |
| | EDMONSTON | | | |
| 614 | MEASLES VIRUS | RVEHAVVYYVYSPSR | 1497 | P08362.1 |
| | STRAIN | | | |
| | EDMONSTON | | | |
| 615 | MEASLES VIRUS | RVFEVGVIRNPGLGA | 1498 | P08362.1 |
| | STRAIN | | | |
| | EDMONSTON | | | |
| 616 | BORDETELLA | RVHVSKEEQYYDYEDATFE | 1499 | P04978.2 |
| | PERTUSSIS | | | |
| 617 | RUBELLA VIRUS | RVIDPAAQ | 1500 | BAA28178.1 |
| 618 | RUBELLA VIRUS | RVKFHTETRTVWQLS | 1501 | BAA28178.1 |
| 619 | BORDETELLA | RVYHNGITGET | 1502 | ACI04548.1 |
| | PERTUSSIS | | | |
| 620 | BORDETELLA | RYDSRPPEDVF | 1503 | ACI04548.1 |
| | PERTUSSIS | | | |
| 621 | MEASLES VIRUS | RYPDAVYLHRIDLGP | 1504 | P69353.1 |
| | STRAIN | | | |
| | EDMONSTON | | | |
| 622 | MEASLES VIRUS | SAEISIQALSYALGG | 1505 | P69353.1 |
| | STRAIN | | | |
| | EDMONSTON | | | |
| 623 | MEASLES VIRUS | SAEPLLSCKPWQESR | 1506 | P04851.1 |
| | STRAIN | | | |
| | EDMONSTON | | | |
| 624 | MEASLES VIRUS | SAEPLLSCKPWQESRKNKAQ | 1507 | P04851.1 |
| | STRAIN | | | |
| | EDMONSTON | | | |
| 625 | MEASLES | SAGKVSSTLASELG | 1508 | P04851.1 |
| | MORBILLIVIRUS | | | |
| 626 | MEASLES VIRUS | SAGKVSSTLASELGITAEDARLVS | 1509 | P04851.1 |
| | STRAIN | | | |
| | EDMONSTON | | | |
| 627 | MEASLES VIRUS | SCTVTREDGT | 1510 | P08362.1 |
| | STRAIN | | | |
| | EDMONSTON | | | |
| 628 | RUBELLA VIRUS | SDAACWGFPTDTVMS | 1511 | BAA28178.1 |
| 629 | MEASLES VIRUS | SDARAAHLPTGTP | 1512 | P04851.1 |
| | STRAIN | | | |
| | EDMONSTON | | | |
| 630 | RUBELLA VIRUS | SDWHQGTHVCHTKHMDFWCVEHD | 1513 | P07566.1 |
| | STRAIN THERIEN | | | |
| 631 | MEASLES VIRUS | SELRRWIKYTQQRRV | 1514 | P04851.1 |
| | STRAIN | | | |
| | EDMONSTON | | | |
| 632 | MEASLES VIRUS | SELRRWIKYTQQRRVVGEFR | 1515 | P04851.1 |
| | STRAIN | | | |
| | EDMONSTON | | | |
| 633 | MEASLES VIRUS | SELSQL | 1516 | P08362.1 |
| | STRAIN | | | |
| | EDMONSTON | | | |
| 634 | MEASLES VIRUS | SELSQLS | 1517 | P08362.1 |
| | STRAIN | | | |
| | EDMONSTON | | | |
| 635 | BORDETELLA | SEYLAHRRIPPENIRRVTRV | 1518 | CAD44970.1 |
| | PERTUSSIS | | | |
| 636 | MEASLES VIRUS | SFLQGDQSENELP | 1519 | P04851.1 |
| | STRAIN | | | |
| | EDMONSTON | | | |
| 637 | MEASLES VIRUS | SGKGVSFQLVKLGVW | 1520 | P08362.1 |
| | STRAIN | | | |
| | EDMONSTON | | | |
| 638 | MEASLES VIRUS | SHRGVIADNQAKWAV | 1521 | P08362.1 |
| | STRAIN | | | |
| | EDMONSTON | | | |
| 639 | MEASLES VIRUS | SIEHQVKDVLTPLFK | 1522 | P08362.1 |
| | STRAIN | | | |
| | EDMONSTON | | | |
| 640 | MEASLES VIRUS | SKIGVVGIGSASYKV | 1523 | P69353.1 |
| | STRAIN | | | |
| | EDMONSTON | | | |
| 641 | MEASLES | SKRSELSQLSMYRVF | 1524 | P06830.1 |
| | MORBILLIVIRUS | | | |
| 642 | MEASLES | SLFVESPGQLIQRITDDPDVS | 1525 | ABI54110.1 |
| | MORBILLIVIRUS | | | |
| 643 | MEASLES VIRUS | SLSTNLDVTNSIEHQ | 1526 | P08362.1 |
| | STRAIN | | | |
| | EDMONSTON | | | |
| 644 | MEASLES VIRUS | SLSTNLDVTNSIEHQVKDVLTPLFK | 1527 | P08362.1 |
| | STRAIN | | | |
| | EDMONSTON | | | |
| 645 | MEASLES VIRUS | SLWGSGLLML | 1528 | BAE98296.1 |
| | STRAIN | | | |
| | EDMONSTON | | | |
| 646 | MEASLES VIRUS | SMKGLSSTSIVYILI | 1529 | P69353.1 |
| | STRAIN | | | |
| | EDMONSTON | | | |
| 647 | MEASLES | SMYRVFEVGV | 1530 | P08362.1 |
| | MORBILLIVIRUS | | | |
| 648 | MEASLES | SNDLSNCMVALGELK | 1531 | P06830.1 |
| | MORBILLIVIRUS | | | |
| 649 | MEASLES VIRUS | SPGQLIQR | 1532 | P10050.1 |
| | STRAIN HALLE | | | |
| 650 | MEASLES VIRUS | SQDPQDSRRSAEP | 1533 | P04851.1 |
| | STRAIN | | | |
| | EDMONSTON | | | |
| 651 | MEASLES | SRIVINREHLMIDRP | 1534 | P06830.1 |
| | MORBILLIVIRUS | | | |
| 652 | MEASLES VIRUS | SRKNKAQTRTPLQ | 1535 | P04851.1 |
| | STRAIN | | | |
| | EDMONSTON | | | |
| 653 | RUBELLA VIRUS | SRLVGATP | 1536 | CAJ88851.1 |
| 654 | RUBELLA VIRUS | SRLVGATPERPRLRLVDADDPLLR | 1537 | CAJ88851.1 |
| 655 | MEASLES VIRUS | SRPGLKPDLTGTSKS | 1538 | P69353.1 |
| | STRAIN | | | |
| | EDMONSTON | | | |
| 656 | BORDETELLA | SRRSVASIVGTLVRM | 1539 | CAD44970.1 |
| | PERTUSSIS | | | |
| 657 | RUBELLA VIRUS | SRWGLGSPNCHGPDW | 1540 | BAA28178.1 |
| 658 | BORDETELLA | SSATK | 1541 | ACI16088.1 |
| | PERTUSSIS | | | |
| 659 | RUBELLA VIRUS | SSGGYAQLASYFNPG | 1542 | BAA28178.1 |
| 660 | BORDETELLA | SSLGNGV | 1543 | ACI16083.1 |
| | PERTUSSIS | | | |
| 661 | MEASLES | SSNLVILPGQDLQYV | 1544 | P06830.1 |
| | MORBILLIVIRUS | | | |
| 662 | MEASLES VIRUS | SSQDPQDSRRSAEPL | 1545 | P04851.1 |
| | STRAIN | | | |
| | EDMONSTON | | | |
| 663 | MEASLES VIRUS | SSQDPQDSRRSAEPLLSCKP | 1546 | P04851.1 |
| | STRAIN | | | |
| | EDMONSTON | | | |
| 664 | MEASLES VIRUS | SSRRHKRFAGVVLAG | 1547 | P69353.1 |
| | STRAIN | | | |
| | EDMONSTON | | | |
| 665 | MEASLES VIRUS | SSTSIVYILIAVCLG | 1548 | P69353.1 |
| | STRAIN | | | |
| | EDMONSTON | | | |
| 666 | BORDETELLA | STPGIVI | 1549 | AAA83981.1 |
| | PERTUSSIS | | | |
| 667 | BORDETELLA | STPGIVIPPQEQITQHGSPYGRC | 1550 | AAA83981.1 |
| | PERTUSSIS | | | |
| 668 | BORDETELLA | STSSSRRYTEVY | 1551 | P04977.1 |
| | PERTUSSIS | | | |
| 669 | MEASLES VIRUS | SYFIVLSIAYPTLSE | 1552 | P69353.1 |
| | STRAIN | | | |
| | EDMONSTON | | | |
| 670 | MEASLES VIRUS | SYRETGPSRASDA | 1553 | P04851.1 |
| | STRAIN | | | |
| | EDMONSTON | | | |
| 671 | BORDETELLA | SYVK | 1554 | ACI16083.1 |
| | PERTUSSIS | | | |
| 672 | RUBELLA VIRUS | SYVQHPHKTVRVKFH | 1555 | BAA28178.1 |
| 673 | RUBELLA VIRUS | TAPGPGEV | 1556 | CAJ88851.1 |
| 674 | BORDETELLA | TATRLLSSTNSRLC | 1557 | AAA83981.1 |
| | PERTUSSIS | | | |
| 675 | MEASLES | TDDPVIDRLYLSSHR | 1558 | P06830.1 |
| | MORBILLIVIRUS | | | |
| 676 | MEASLES VIRUS | TEILSLFGPSLRDPI | 1559 | P69353.1 |
| | STRAIN | | | |
| | EDMONSTON | | | |
| 677 | RUBELLA VIRUS | TETRTVWQLSVAGVS | 1560 | BAA28178.1 |
| 678 | BORDETELLA | TEVYLEHRMQEAVE | 1561 | P04977.1 |
| | PERTUSSIS | | | |
| 679 | MEASLES VIRUS | TFMPEGTVCSQNALY | 1562 | P69353.1 |
| | STRAIN | | | |
| | EDMONSTON | | | |
| 680 | RUBELLA VIRUS | TGACICEIPTDVSCE | 1563 | BAA28178.1 |
| 681 | BORDETELLA | TGDLRAY | 1564 | ACI16083.1 |
| | PERTUSSIS | | | |
| 682 | MEASLES | TGMQSWVPLSTDDPV | 1565 | P06830.1 |
| | MORBILLIVIRUS | | | |
| 683 | RUBELLA VIRUS | TGNQQSRWGLGSPNC | 1566 | BAA28178.1 |
| 684 | MEASLES VIRUS | TGPSRASDARAAH | 1567 | P04851.1 |
| | STRAIN | | | |
| | EDMONSTON | | | |
| 685 | MEASLES | TGTIINQDPDKILTY | 1568 | AAF02706.1 |
| | MORBILLIVIRUS | | | |
| 686 | RUBELLA VIRUS | TGVVYGTHTTAVSET | 1569 | BAA28178.1 |
| 687 | MEASLES VIRUS | TIRGQFSNMSLSLLD | 1570 | P08362.1 |
| | STRAIN | | | |
| | EDMONSTON | | | |
| 688 | RUBELLA VIRUS | TLGATCALPLAGLLA | 1571 | BAA28178.1 |
| 689 | MEASLES | TLLNNCTRV | 1572 | P26031.1 |
| | MORBILLIVIRUS | | | |
| 690 | MEASLES VIRUS | TLNVPPPPDPGR | 1573 | P03422.1 |
| | STRAIN | | | |
| | EDMONSTON-B | | | |
| 691 | MEASLES VIRUS | TLNVPPPPDPGRASTSGTPIKK | 1574 | P03422.1 |
| | STRAIN | | | |
| | EDMONSTON-B | | | |
| 692 | MEASLES | TMTSQGMYGGTYPVE | 1575 | P06830.1 |
| | MORBILLIVIRUS | | | |
| 693 | MEASLES VIRUS | TNLGNAIAKLEDAKE | 1576 | P69353.1 |
| | STRAIN | | | |
| | EDMONSTON | | | |
| 694 | MEASLES VIRUS | TNMEDEADQYFSHDD | 1577 | P04851.1 |
| | STRAIN | | | |
| | EDMONSTON | | | |
| 695 | MEASLES VIRUS | TNMEDEADQYFSHDDPISSD | 1578 | P04851.1 |
| | STRAIN | | | |
| | EDMONSTON | | | |
| 696 | RUBELLA VIRUS | TNPFQAAVARGLRPP | 1579 | CAA28880.1 |
| | STRAIN M33 | | | |
| 697 | MEASLES | TNSIEHQVKDVLTPL | 1580 | P06830.1 |
| | MORBILLIVIRUS | | | |
| 698 | MEASLES VIRUS | TNYLEQPVSNDLSNC | 1581 | P08362.1 |
| | STRAIN | | | |
| | EDMONSTON | | | |
| 699 | MEASLES | TNYLEQPVSNDLSNCMVALGELKLAAL | 1582 | AAR89413.1 |
| | MORBILLIVIRUS | | | |
| 700 | RUBELLA VIRUS | TPERPRLR | 1583 | CAJ88851.1 |
| 701 | RUBELLA VIRUS | TPERPRLRLVDADDPLLRTA | 1584 | P07566.1 |
| | STRAIN THERIEN | | | |
| 702 | MEASLES VIRUS | TPGNKPRIA | 1585 | P10050.1 |
| | STRAIN HALLE | | | |
| 703 | MEASLES VIRUS | TPLDIDTASESSQDP | 1586 | P04851.1 |
| | STRAIN | | | |
| | EDMONSTON | | | |
| 704 | MEASLES VIRUS | TPLDIDTASESSQDPQDSRR | 1587 | P04851.1 |
| | STRAIN | | | |
| | EDMONSTON | | | |
| 705 | MEASLES VIRUS | TPLFKIIGDEVGLRT | 1588 | P08362.1 |
| | STRAIN | | | |
| | EDMONSTON | | | |
| 706 | MEASLES VIRUS | TPLQCTM | 1589 | P04851.1 |
| | STRAIN | | | |
| | EDMONSTON | | | |
| 707 | RUBELLA VIRUS | TPVIGSQA | 1590 | CAJ88851.1 |
| 708 | RUBELLA VIRUS | TPVIGSQARK | 1591 | BAA19893.1 |
| 709 | MEASLES VIRUS | TQGYLISNFDESSCT | 1592 | P69353.1 |
| | STRAIN | | | |
| | EDMONSTON | | | |
| 710 | BORDETELLA | TRANPNPYTSRRSVASIVGTLVRM | 1593 | P04977.1 |
| | PERTUSSIS | | | |
| 711 | RUBELLA VIRUS | TRFGCAMRWGLPP | 1594 | NP_740663.1 |
| 712 | BORDETELLA | TRNTGQPATDHYYSNV | 1595 | AAA83981.1 |
| | PERTUSSIS | | | |
| 713 | MEASLES VIRUS | TRTPLQCTMTEIF | 1596 | P04851.1 |
| | STRAIN | | | |
| | EDMONSTON | | | |
| 714 | RUBELLA VIRUS | TRWHRLLRMPVR | 1597 | ABD64216.1 |
| 715 | MEASLES VIRUS | TSGSGGAIRGIKHII | 1598 | P04851.1 |
| | STRAIN | | | |
| | EDMONSTON | | | |
| 716 | MEASLES VIRUS | TSGSGGAIRGIKHIIIVPIP | 1599 | P04851.1 |
| | STRAIN | | | |
| | EDMONSTON | | | |
| 717 | MEASLES VIRUS | TSQGMYGGTYLVEKP | 1600 | P08362.1 |
| | STRAIN | | | |
| | EDMONSTON | | | |
| 718 | MEASLES | TSRVEHAVVYYVYSP | 1601 | P06830.1 |
| | MORBILLIVIRUS | | | |
| 719 | BORDETELLA | TSSSRRYTEVYL | 1602 | ACI04548.1 |
| | PERTUSSIS | | | |
| 720 | BORDETELLA | TSYVG | 1603 | ACI16088.1 |
| | PERTUSSIS | | | |
| 721 | MEASLES VIRUS | TTEDKISRAVGPRQA | 1604 | P04851.1 |
| | STRAIN | | | |
| | EDMONSTON | | | |
| 722 | MEASLES VIRUS | TTEDKISRAVGPRQAQVSFL | 1605 | P04851.1 |
| | STRAIN | | | |
| | EDMONSTON | | | |
| 723 | RUBELLA VIRUS | TTERIETRSARHP | 1606 | ABD64214.1 |
| | STRAIN M33 | | | |
| 724 | MEASLES VIRUS | TTNQAIEAIRQAGQE | 1607 | P69353.1 |
| | STRAIN | | | |
| | EDMONSTON | | | |
| 725 | RUBELLA VIRUS | TTSDPWHPPGPLGLK | 1608 | BAA28178.1 |
| 726 | MEASLES VIRUS | TVCSQNALYPMSPLL | 1609 | P69353.1 |
| | STRAIN | | | |
| | EDMONSTON | | | |
| 727 | RUBELLA VIRUS | TVNGEDVGAVPPGKF | 1610 | BAA28178.1 |
| 728 | MEASLES | TYPVEKPNLSSKRSE | 1611 | P06830.1 |
| | MORBILLIVIRUS | | | |
| 729 | RUBELLA VIRUS | VAGVSCNVTTEHPFC | 1612 | BAA28178.1 |
| 730 | BORDETELLA | VAPGIVIPPKALFTQQGGAYGRC | 1613 | P04979.1 |
| | PERTUSSIS | | | |
| 731 | RUBELLA VIRUS | VCHTKHMDFWCVEHDRPPPATPTPL | 1614 | NP_740663.1 |
| 732 | RUBELLA VIRUS | VCQRHSPDCSRLVGATPER | 1615 | BAA19893.1 |
| 733 | RUBELLA VIRUS | VDADDPLL | 1616 | CAJ88851.1 |
| 734 | RUBELLA VIRUS | VDADDPLLRTAPGPGEVWVT | 1617 | BAA19893.1 |
| 735 | CORYNEBACTERIUM | VDIGFAAYNFVESIINLFQV | 1618 | AAV70486.1 |
| | DIPHTHERIAE | | | |
| 736 | MEASLES VIRUS | VEIAEYRRLLRTVLE | 1619 | P69353.1 |
| | STRAIN | | | |
| | EDMONSTON | | | |
| 737 | MEASLES VIRUS | VELENSMGGLNFGRS | 1620 | P04851.1 |
| | STRAIN | | | |
| | EDMONSTON | | | |
| 738 | MEASLES VIRUS | VELENSMGGLNFGRSYFDPA | 1621 | P04851.1 |
| | STRAIN | | | |
| | EDMONSTON | | | |
| 739 | MEASLES | VELKIKIASGFGPLI | 1622 | P06830.1 |
| | MORBILLIVIRUS | | | |
| 740 | RUBELLA VIRUS | VEMDEWIHAHTTSD | 1623 | SRC265968 |
| 741 | RUBELLA VIRUS | VEMPEWIHAHTTSDP | 1624 | BAA28178.1 |
| 742 | CORYNEBACTERIUM | VERRLVKVL | 1625 | P33120.2 |
| | DIPHTHERIAE | | | |
| 743 | MEASLES | VESPGQLI | 1626 | ABI54110.1 |
| | MORBILLIVIRUS | | | |
| 744 | MEASLES VIRUS | VESPGQLIQRITDDP | 1627 | P04851.1 |
| | STRAIN | | | |
| | EDMONSTON | | | |
| 745 | MEASLES VIRUS | VESPGQLIQRITDDPDVSIR | 1628 | P04851.1 |
| | STRAIN | | | |
| | EDMONSTON | | | |
| 746 | RUBELLA VIRUS | VFALASYVQHPHKTV | 1629 | BAA28178.1 |
| 747 | RUBELLA VIRUS | VGATPERP | 1630 | CAJ88851.1 |
| 748 | RUBELLA VIRUS | VGATPERPRL | 1631 | BAA19893.1 |
| 749 | RUBELLA VIRUS | VGATPERPRLRLVDA | 1632 | BAA28178.1 |
| 750 | MEASLES VIRUS | VGIGSASYKVMTRSS | 1633 | P69353.1 |
| | STRAIN | | | |
| | EDMONSTON | | | |
| 751 | MEASLES VIRUS | VGLRTPQRFTDLVKF | 1634 | P08362.1 |
| | STRAIN | | | |
| | EDMONSTON | | | |
| 752 | CORYNEBACTERIUM | VHHNTEEIVAQSIALSSLMV | 1635 | AAV70486.1 |
| | DIPHTHERIAE | | | |
| 753 | MEASLES VIRUS | VHRLEGVSYNIGSQE | 1636 | P69353.1 |
| | STRAIN | | | |
| | EDMONSTON | | | |
| 754 | RUBELLA VIRUS | VIGSQARK | 1637 | CAJ88851.1 |
| 755 | BORDETELLA | VITGSI | 1638 | ACI16088.1 |
| | PERTUSSIS | | | |
| 756 | BORDETELLA | VITGTI | 1639 | ACI16083.1 |
| | PERTUSSIS | | | |
| 757 | MEASLES VIRUS | VKQSRGEA | 1640 | P04851.1 |
| | STRAIN | | | |
| | EDMONSTON | | | |
| 758 | MEASLES VIRUS | VLFVMFLSLI | 1641 | P08362.1 |
| | STRAIN | | | |
| | EDMONSTON | | | |
| 759 | MEASLES | VLFVMFLSLIGLLAI | 1642 | P06830.1 |
| | MORBILLIVIRUS | | | |
| 760 | MEASLES | VLTPLFKIIGDEVGL | 1643 | P06830.1 |
| | MORBILLIVIRUS | | | |
| 761 | MEASLES VIRUS | VMTRSSHQSLVIKLM | 1644 | P69353.1 |
| | STRAIN | | | |
| | EDMONSTON | | | |
| 762 | RUBELLA VIRUS | VPAAPCARIWNGTQR | 1645 | BAA28178.1 |
| 763 | RUBELLA VIRUS | VPPDPGDLVEYIMNY | 1646 | BAA28178.1 |
| 764 | MEASLES VIRUS | VQSVASSRRHKRFAG | 1647 | P69353.1 |
| | STRAIN | | | |
| | EDMONSTON | | | |
| 765 | BORDETELLA | VQTGGTSRTVTMRYLAS | 1648 | ACI16083.1 |
| | PERTUSSIS | | | |
| 766 | BORDETELLA | VQVRI | 1649 | ACI16083.1 |
| | PERTUSSIS | | | |
| 767 | RUBELLA VIRUS | VRAYNQPAGDV | 1650 | NP_740662.1 |
| 768 | RUBELLA VIRUS | VRFESKIVDGGCFAP | 1651 | BAA28178.1 |
| 769 | RUBELLA VIRUS | VRLAGVRFESKIVDG | 1652 | BAA28178.1 |
| 770 | MEASLES VIRUS | VSGSFGNRFILSQGN | 1653 | P69353.1 |
| | STRAIN | | | |
| | EDMONSTON | | | |
| 771 | BORDETELLA | VSKEEQYYDYEDAT | 1654 | AAA83981.1 |
| | PERTUSSIS | | | |
| 772 | MEASLES VIRUS | VSKGNCSGPTTIRGQ | 1655 | P08362.1 |
| | STRAIN | | | |
| | EDMONSTON | | | |
| 773 | RUBELLA VIRUS | VTAALLNTPPPYQVS | 1656 | BAA28178.1 |
| 774 | RUBELLA VIRUS | VTGCYQCGTPALVEG | 1657 | BAA28178.1 |
| 775 | RUBELLA VIRUS | VTPVIGSQ | 1658 | CAJ88851.1 |
| 776 | RUBELLA VIRUS | VTTEHPFCNTPHGQLEVQVPPD | 1659 | P07566.1 |
| | STRAIN THERIEN | | | |
| 777 | MEASLES VIRUS | VVLAGAALGVATAAQ | 1660 | P69353.1 |
| | STRAIN | | | |
| | EDMONSTON | | | |
| 778 | RUBELLA VIRUS | VWQLSVAGVSCNVTT | 1661 | BAA28178.1 |
| 779 | RUBELLA VIRUS | VWVTPVIG | 1662 | CAJ88851.1 |
| 780 | RUBELLA VIRUS | VWVTPVIGSQAR | 1663 | BAA19893.1 |
| 781 | MEASLES VIRUS | VYILIAVCLGGLIGI | 1664 | P69353.1 |
| | STRAIN | | | |
| | EDMONSTON | | | |
| 782 | MEASLES VIRUS | VYLHRIDLGPPISLE | 1665 | P69353.1 |
| | STRAIN | | | |
| | EDMONSTON | | | |
| 783 | BORDETELLA | VYRYDSRP | 1666 | P04977.1 |
| | PERTUSSIS | | | |
| 784 | BORDETELLA | VYRYDSRPPEDV | 1667 | P04977.1 |
| | PERTUSSIS | | | |
| 785 | MEASLES | VYWLTIPPMKNLALG | 1668 | P06830.1 |
| | MORBILLIVIRUS | | | |
| 786 | RUBELLA VIRUS | WDLEATGACICEIPT | 1669 | BAA28178.1 |
| 787 | MEASLES | WDQKLWCRHFCVLAD | 1670 | AAR89413.1 |
| | MORBILLIVIRUS | | | |
| 788 | RUBELLA VIRUS | WGFPTDTVMSVFALA | 1671 | BAA28178.1 |
| 789 | RUBELLA VIRUS | WHPPGPLGLKFKTVR | 1672 | BAA28178.1 |
| 790 | RUBELLA VIRUS | WIHAHTTSDPWHPPG | 1673 | BAA28178.1 |
| 791 | MEASLES VIRUS | WLTIPPMKNLALGVI | 1674 | P08362.1 |
| | STRAIN | | | |
| | EDMONSTON | | | |
| 792 | MEASLES VIRUS | WQESRKNKAQTRTPLQCTMT | 1675 | P04851.1 |
| | STRAIN | | | |
| | EDMONSTON | | | |
| 793 | RUBELLA VIRUS | WVCIFMVCRRACR | 1676 | SRC265968 |
| 794 | RUBELLA VIRUS | WVTPVIGS | 1677 | CAJ88851.1 |
| 795 | MEASLES VIRUS | WYTTVPKYVATQGYL | 1678 | P69353.1 |
| | STRAIN | | | |
| | EDMONSTON | | | |
| 796 | MEASLES VIRUS | YALGGDINKVLEKLG | 1679 | P69353.1 |
| | STRAIN | | | |
| | EDMONSTON | | | |
| 797 | MEASLES VIRUS | YAMGVGVELE | 1680 | P04851.1 |
| | STRAIN | | | |
| | EDMONSTON | | | |
| 798 | MEASLES | YAMGVGVELEN | 1681 | ABI54110.1 |
| | MORBILLIVIRUS | | | |
| 799 | MEASLES | YCADVAAEELMNALV | 1682 | AAR89413.1 |
| | MORBILLIVIRUS | | | |
| 800 | MEASLES | YDFRDLTWCINPPER | 1683 | P06830.1 |
| | MORBILLIVIRUS | | | |
| 801 | BORDETELLA | YFEPGPT | 1684 | ACI16083.1 |
| | PERTUSSIS | | | |
| 802 | RUBELLA VIRUS | YFNPGGSYYKQYHPT | 1685 | BAA28178.1 |
| 803 | MEASLES VIRUS | YFRLGQEMVRRSAGK | 1686 | P04851.1 |
| | STRAIN | | | |
| | EDMONSTON | | | |
| 804 | MEASLES VIRUS | YFRLGQEMVRRSAGKVSSTL | 1687 | P04851.1 |
| | STRAIN | | | |
| | EDMONSTON | | | |
| 805 | MEASLES | YFYPFRLPIKGVPIE | 1688 | P06830.1 |
| | MORBILLIVIRUS | | | |
| 806 | BORDETELLA | YGDNAGRILAGALAT | 1689 | P04977.1 |
| | PERTUSSIS | | | |
| 807 | RUBELLA VIRUS | YGHATVEMPEWIHAH | 1690 | BAA28178.1 |
| 808 | RUBELLA VIRUS | YIMNYTGNQQSRWGL | 1691 | BAA28178.1 |
| 809 | MEASLES VIRUS | YINNELIPSMNQLSC | 1692 | P69353.1 |
| | STRAIN | | | |
| | EDMONSTON | | | |
| 810 | RUBELLA VIRUS | YLCTAPGCATQAPVP | 1693 | BAA28178.1 |
| 811 | MEASLES | YLFTVPIKEAGEDCH | 1694 | P06830.1 |
| | MORBILLIVIRUS | | | |
| 812 | MEASLES VIRUS | YLHDPEFNL | 1695 | ABK40531.1 |
| | STRAIN | | | |
| | EDMONSTON | | | |
| 813 | MEASLES VIRUS | YLNMSRLFV | 1696 | ABK40531.1 |
| | STRAIN | | | |
| | EDMONSTON | | | |
| 814 | MEASLES VIRUS | YPALGLHEF | 1697 | P10050.1 |
| | STRAIN HALLE | | | |
| 815 | MEASLES | YPALGLHEFA | 1698 | ABI54110.1 |
| | MORBILLIVIRUS | | | |
| 816 | MEASLES VIRUS | YPALGLHEFAGELST | 1699 | P04851.1 |
| | STRAIN | | | |
| | EDMONSTON | | | |
| 817 | MEASLES VIRUS | YPALGLHEFAGELSTLESLM | 1700 | P04851.1 |
| | STRAIN | | | |
| | EDMONSTON | | | |
| 818 | MEASLES VIRUS | YPFRLPIKGVPIELQ | 1701 | P08362.1 |
| | STRAIN | | | |
| | EDMONSTON | | | |
| 819 | MEASLES VIRUS | YPLLWSYAM | 1702 | P10050.1 |
| | STRAIN HALLE | | | |
| 820 | MUMPS | YQQQGRL | 1703 | P21186.1 |
| | RUBULAVIRUS | | | |
| 821 | BORDETELLA | YQSEYLAHRR | 1704 | P04977.1 |
| | PERTUSSIS | | | |
| 822 | MEASLES VIRUS | YRETGPSRASDARAA | 1705 | P04851.1 |
| | STRAIN | | | |
| | EDMONSTON | | | |
| 823 | MEASLES VIRUS | YRETGPSRASDARAAHLPTG | 1706 | P04851.1 |
| | STRAIN | | | |
| | EDMONSTON | | | |
| 824 | RUBELLA VIRUS | YRNASDVLPGHWLQGGWGCYNLSDW | 1707 | NP_740663.1 |
| 825 | MEASLES VIRUS | YRRLLRTVLEPIRDA | 1708 | P69353.1 |
| | STRAIN | | | |
| | EDMONSTON | | | |
| 826 | BORDETELLA | YRYDSRPP | 1709 | P04977.1 |
| | PERTUSSIS | | | |
| 827 | MEASLES VIRUS | YSGGDLLGILESRGI | 1710 | P69353.1 |
| | STRAIN | | | |
| | EDMONSTON | | | |
| 828 | BORDETELLA | YSKVTATBLLASTNSRLCAVFVRDG | 1711 | SRC280066 |
| | PERTUSSIS | | | |
| 829 | MEASLES VIRUS | YSPSRSFSYFYPFRL | 1712 | P08362.1 |
| | STRAIN | | | |
| | EDMONSTON | | | |
| 830 | RUBELLA VIRUS | YTGNQQSRWGLGSPNCHGPDWASPV | 1713 | P07566.1 |
| | STRAIN THERIEN | | | |
| 831 | MEASLES | YVLLAVLFV | 1714 | P08362.1 |
| | MORBILLIVIRUS | | | |
| 832 | MEASLES | YVYSPGRSFSYFYPF | 1715 | P06830.1 |
| | MORBILLIVIRUS | | | |
| 833 | BORDETELLA | YYDYEDATFQTYALTGISLCNPAASIC | 1716 | P04979.1 |
| | PERTUSSIS | | | |
| 834 | MEASLES | GDLLGILESRGIKAR | 1717 | AAF02706.1 |
| | MORBILLIVIRUS | | | |
| 835 | MEASLES | TVPKYVATQGYLISN | 1718 | AAL29688.1 |
| | MORBILLIVIRUS | | | |
| 836 | MEASLES | KPWDSPQEI | 1719 | P26035.1 |
| | MORBILLIVIRUS | | | |
| 837 | MEASLES | KPWESPQEI | 1720 | CAA34579.1 |
| | MORBILLIVIRUS | | | |
| 838 | BORDETELLA | ATYQSEYLAHRRIPP | 1721 | ACI04548.1 |
| | PERTUSSIS | | | |
| 839 | BORDETELLA | CMARQAESSEAMAAWSERAGEAMVLVYYES | 1722 | ACI04548.1 |
| | PERTUSSIS | IAYSF | | |
| 840 | BORDETELLA | CQVGSSNSAFVSTSSSRRYTEVYL | 1723 | ACI04548.1 |
| | PERTUSSIS | | | |
| 841 | BORDETELLA | DDPPATVYRYDSRPP | 1724 | ACI04548.1 |
| | PERTUSSIS | | | |
| 842 | BORDETELLA | GALATYQSEYLAHRRIPP | 1725 | ACI04548.1 |
| | PERTUSSIS | | | |
| 843 | BORDETELLA | MAAWSERAGEAMVLVYYESIAYSF | 1726 | ACI04548.1 |
| | PERTUSSIS | | | |
| 844 | BORDETELLA | MVLVYYESIAYSF | 1727 | ACI04548.1 |
| | PERTUSSIS | | | |
| 845 | BORDETELLA | PATVYRYDSRPPEDV | 1728 | ACI04548.1 |
| | PERTUSSIS | | | |
| 846 | BORDETELLA | YDSRPPEDV | 1729 | ACI04548.1 |
| | PERTUSSIS | | | |
| 847 | BORDETELLA | EPGITTNYDT | 1730 | ACI16087.1 |
| | PERTUSSIS | | | |
| 848 | BORDETELLA | GDLRAYKMVYATNPQTQLSN | 1731 | ACI16083.1 |
| | PERTUSSIS | | | |
| 849 | BORDETELLA | KNGDVEASAITTYVGFSVVYP | 1732 | ACI16083.1 |
| | PERTUSSIS | | | |
| 850 | BORDETELLA | KVTNGSKSYTLRYLASYVK | 1733 | ACI 1608 8.1 |
| | PERTUSSIS | | | |
| 851 | BORDETELLA | QALGALKLYFEPGITTNYDTGDLIAYKQTY | 1734 | ACI 1608 8.1 |
| | PERTUSSIS | NASGN | | |
| 852 | BORDETELLA | YATNPQTQLS | 1735 | ACI16083.1 |
| | PERTUSSIS | | | |
| 853 | CORYNEBACTERIUM | DNENPLSGKAGGVVKVTYPGLTKV | 1736 | AAV70486.1 |
| | DIPHTHERIAE | | | |
| 854 | CORYNEBACTERIUM | ENFSSYHGTKPGYVDSI | 1737 | AAV70486.1 |
| | DIPHTHERIAE | | | |
| 855 | CORYNEBACTERIUM | KVDNAETIKKELGLSLTEP | 1738 | AAV70486.1 |
| | DIPHTHERIAE | | | |
| 856 | RUBELLA VIRUS | MEDLQKALEAQSRALRAGLAA | 1739 | CAA28880.1 |
| | STRAIN M33 | | | |
| 857 | CORYNEBACTERIUM | QKGIQKPKSGTQGNYDDDWKGFY | 1740 | AAV70486.1 |
| | DIPHTHERIAE | | | |
| 858 | RUBELLA VIRUS | RTGAWQRKDWSRAPPPPEERQESRSQTPAP | 1741 | CAA28880.1 |
| | STRAIN M33 | KPSR | | |
| 859 | RUBELLA VIRUS | AAGASQSRRPRPPRHARAQHLPEMTPAVT | 1742 | SRC265968 |
| 860 | RUBELLA VIRUS | CVTSWLWSEGEGAVFYRVDLHFINLGTP | 1743 | CAA28880.1 |
| 861 | RUBELLA VIRUS | FRVGGTRWHRLLRMPVRGLDGDTAPLP | 1744 | CAA28880.1 |
| 862 | CORYNEBACTERIUM | GRKIRMRCRAIDGDVTFCRPKSPVYVGN | 1745 | 1007216A |
| | DIPHTHERIAE | | | |
| 863 | RUBELLA VIRUS | GTPPLDEDGRWDPALMYNPCGPEPPAHV | 1746 | CAA28880.1 |
| 864 | CORYNEBACTERIUM | GVHANLHVAFHRSSSEKIHSNEISSDSIGV | 1747 | AAV70486.1 |
| | DIPHTHERIAE | LGYQKTVDHTKVNSKLSLFFEIKS | | |
| 865 | RUBELLA VIRUS | MASTTPITMEDLQKALEAQSRALRAGLAAG | 1748 | ABD64200.1 |
| 866 | RUBELLA VIRUS | PELGPPTNPFQAAVARGLRPPLHDPDTEAP | 1749 | CAA28880.1 |
| | | TEAC | | |
| 867 | RUBELLA VIRUS | PLPPHTTERIETRSARHPWRIRFGAP | 1750 | CAA28880.1 |
| 868 | RUBELLA VIRUS | SRAPPPPEERQESRSQTPAPKPSRAPP | 1751 | CAA28880.1 |
| 869 | RUBELLA VIRUS | SRAPPQQPQPPRMQTGRGGSAPRPELGP | 1752 | CAA28880.1 |
| 870 | RUBELLA VIRUS | TPAVTPEGPAPPRTGAWQRKDWSRAPP | 1753 | CAA28880.1 |
| 871 | RUBELLA VIRUS | VRAYNQPAGDVRGVWGKGERTYAEQDFRV | 1754 | CAA28880.1 |
| 872 | RUBELLA VIRUS | AFGHSDAACWGFPTDTVMSV | 1755 | CAA28880.1 |
| 873 | RUBELLA VIRUS | CARIWNGTQRACTFWAVNAYS | 1756 | CAA28880.1 |
| 874 | RUBELLA VIRUS | EEAFTYLCTAPGCATQTPVPVR | 1757 | CAA28880.1 |
| 875 | RUBELLA VIRUS | FAPWDLEATGACICEIPTDV | 1758 | CAA28880.1 |
| 876 | RUBELLA VIRUS | GEDVGAFPPGKFVTAAL | 1759 | CAA28880.1 |
| 877 | RUBELLA VIRUS | GEVWVTPVIGSQARKCGLHI | 1760 | CAA28880.1 |
| 878 | RUBELLA VIRUS | GQLEVQVPPDPGDLVEYIMN | 1761 | CAA28880.1 |
| 879 | RUBELLA VIRUS | GSYYKQYHPTACEVEPAFGH | 1762 | CAA28880.1 |
| 880 | RUBELLA VIRUS | IHAHTTSDPWHPPGPLGLKF | 1763 | CAA28880.1 |
| 881 | RUBELLA VIRUS | IMNYTGNQQSRWGLGSPNCH | 1764 | CAA28880.1 |
| 882 | RUBELLA VIRUS | LHIRAGPYGHATVEMPEWIH | 1765 | CAA28880.1 |
| 883 | RUBELLA VIRUS | LKFKTVRPVALPRALAPPRN | 1766 | CAA28880.1 |
| 884 | RUBELLA VIRUS | LNTPPPYQVSCGGESDRASAGH | 1767 | CAA28880.1 |
| 885 | RUBELLA VIRUS | NCHGPDWASPVCQRHSPDCS | 1768 | CAA28880.1 |
| 886 | RUBELLA VIRUS | PDCSRLVGATPERPRLRLVD | 1769 | CAA28880.1 |
| 887 | RUBELLA VIRUS | PRNVRVTGCYQCGTPALVEG | 1770 | CAA28880.1 |
| 888 | RUBELLA VIRUS | PTDVSCEGLGAWVPTAPCARI | 1771 | CAA28880.1 |
| 889 | RUBELLA VIRUS | RLVDADDPLLRTAPGPGEVW | 1772 | CAA28880.1 |
| 890 | RUBELLA VIRUS | SVFALASYVQHPHKTVRVKF | 1773 | CAA28880.1 |
| 891 | RUBELLA VIRUS | VEGLAPGGGNCHLTVNGEDV | 1774 | CAA28880.1 |
| 892 | RUBELLA VIRUS | VKFHTETRTVWQLSVAGVSC | 1775 | CAA28880.1 |
| 893 | RUBELLA VIRUS | VPVRLAGVGFESKIVDGGCF | 1776 | CAA28880.1 |
| 894 | RUBELLA VIRUS | VSCNVTTEHPFCNTPHGQLE | 1777 | CAA28880.1 |
| 895 | BORDETELLA | AAASSPDAHVPF | 1778 | AAA22983.1 |
| | PERTUSSIS | | | |
| 896 | BORDETELLA | AASSPDA | 1779 | AAA22983.1 |
| | PERTUSSIS | | | |
| 897 | BORDETELLA | AKLGAAASSPDA | 1780 | AAA22983.1 |
| | PERTUSSIS | | | |
| 898 | BORDETELLA | AMKPYEVTPTRM | 1781 | AAA22983.1 |
| | PERTUSSIS | | | |
| 899 | BORDETELLA | AMTHLSPALADVPYVLVKTNMVVTS | 1782 | AAA22983.1 |
| | PERTUSSIS | | | |
| 900 | BORDETELLA | ASSPDAHVPFCF | 1783 | AAA22983.1 |
| | PERTUSSIS | | | |
| 901 | BORDETELLA | ASSPDAHVPFCFGKDLKRPGSSPME | 1784 | AAA22983.1 |
| | PERTUSSIS | | | |
| 902 | BORDETELLA | CFGKDLKRPGSS | 1785 | AAA22983.1 |
| | PERTUSSIS | | | |
| 903 | BORDETELLA | CFGKDLKRPGSSPMEVMLRAVFMQQ | 1786 | AAA22983.1 |
| | PERTUSSIS | | | |
| 904 | BORDETELLA | CGIAAKLGAAAS | 1787 | AAA22983.1 |
| | PERTUSSIS | | | |
| 905 | BORDETELLA | CGIAAKLGAAASSPDAHVPFCFGKD | 1788 | AAA22983.1 |
| | PERTUSSIS | | | |
| 906 | BORDETELLA | DAHVPFCFGKDL | 1789 | AAA22983.1 |
| | PERTUSSIS | | | |
| 907 | BORDETELLA | DLKRPGSSPMEV | 1790 | AAA22983.1 |
| | PERTUSSIS | | | |
| 908 | BORDETELLA | DVPYVLVKTNMV | 1791 | AAA22983.1 |
| | PERTUSSIS | | | |
| 909 | BORDETELLA | DVPYVLVKTNMVVTSVAMKPYEVTPT | 1792 | AAA22983.1 |
| | PERTUSSIS | | | |
| 910 | BORDETELLA | EVMLRAVFMQQR | 1793 | AAA22983.1 |
| | PERTUSSIS | | | |
| 911 | BORDETELLA | FEGKPALELIRM | 1794 | AAA22983.1 |
| | PERTUSSIS | | | |
| 912 | BORDETELLA | FLGPKQLTFEGK | 1795 | AAA22983.1 |
| | PERTUSSIS | | | |
| 913 | BORDETELLA | FLGPKQLTFEGKPALELIRMVECSG | 1796 | AAA22983.1 |
| | PERTUSSIS | | | |
| 914 | BORDETELLA | FMQQRPLRMFLGPKQLT | 1797 | AAA22983.1 |
| | PERTUSSIS | | | |
| 915 | BORDETELLA | GKDLKRPGSSPM | 1798 | AAA22983.1 |
| | PERTUSSIS | | | |
| 916 | BORDETELLA | GKDLKRPGSSPME | 1799 | AAA22983.1 |
| | PERTUSSIS | | | |
| 917 | BORDETELLA | GKPALELIRMVE | 1800 | AAA22983.1 |
| | PERTUSSIS | | | |
| 918 | BORDETELLA | GPKQLTFEGKPA | 1801 | AAA22983.1 |
| | PERTUSSIS | | | |
| 919 | BORDETELLA | HVPFCFGKDLKR | 1802 | AAA22983.1 |
| | PERTUSSIS | | | |
| 920 | BORDETELLA | IAAKLGAAASSP | 1803 | AAA22983.1 |
| | PERTUSSIS | | | |
| 921 | BORDETELLA | KPYEVTPTRMLV | 1804 | AAA22983.1 |
| | PERTUSSIS | | | |
| 922 | BORDETELLA | KQLTFEGKPALE | 1805 | AAA22983.1 |
| | PERTUSSIS | | | |
| 923 | BORDETELLA | KRPGSSPMEVML | 1806 | AAA22983.1 |
| | PERTUSSIS | | | |
| 924 | BORDETELLA | LELIRMVECSGK | 1807 | AAA22983.1 |
| | PERTUSSIS | | | |
| 925 | BORDETELLA | LGAAASSPDAHV | 1808 | AAA22983.1 |
| | PERTUSSIS | | | |
| 926 | BORDETELLA | LIRMVECSGKQD | 1809 | AAA22983.1 |
| | PERTUSSIS | | | |
| 927 | BORDETELLA | LVCGIAAKLGAA | 1810 | AAA22983.1 |
| | PERTUSSIS | | | |
| 928 | BORDETELLA | MKPYEVTPTRM | 1811 | AAA22983.1 |
| | PERTUSSIS | | | |
| 929 | BORDETELLA | MLRAVFMQQRPL | 1812 | AAA22983.1 |
| | PERTUSSIS | | | |
| 930 | BORDETELLA | MQQRPLRM | 1813 | AAA22983.1 |
| | PERTUSSIS | | | |
| 931 | BORDETELLA | MQQRPLRMFLGP | 1814 | AAA22983.1 |
| | PERTUSSIS | | | |
| 932 | BORDETELLA | MVVTSVAMKPYE | 1815 | AAA22983.1 |
| | PERTUSSIS | | | |
| 933 | BORDETELLA | MVVTSVAMKPYEVTPTRMLVCGIAA | 1816 | AAA22983.1 |
| | PERTUSSIS | | | |
| 934 | BORDETELLA | PALELIRMVECS | 1817 | AAA22983.1 |
| | PERTUSSIS | | | |
| 935 | BORDETELLA | PALELIRMVECSGK | 1818 | AAA22983.1 |
| | PERTUSSIS | | | |
| 936 | BORDETELLA | PFCFGKDLKRPG | 1819 | AAA22983.1 |
| | PERTUSSIS | | | |
| 937 | BORDETELLA | PGSSPMEVMLRA | 1820 | AAA22983.1 |
| | PERTUSSIS | | | |
| 938 | BORDETELLA | PGSSPMEVMLRAVF | 1821 | AAA22983.1 |
| | PERTUSSIS | | | |
| 939 | BORDETELLA | PKQLTFEGK | 1822 | AAA22983.1 |
| | PERTUSSIS | | | |
| 940 | BORDETELLA | PLRMFLGPKQLT | 1823 | AAA22983.1 |
| | PERTUSSIS | | | |
| 941 | BORDETELLA | PTRMLVCGIAAK | 1824 | AAA22983.1 |
| | PERTUSSIS | | | |
| 942 | BORDETELLA | PYVLVKTNMVVT | 1825 | AAA22983.1 |
| | PERTUSSIS | | | |
| 943 | BORDETELLA | QLTFEGKPALELIRMVECSGKQDCP | 1826 | AAA22983.1 |
| | PERTUSSIS | | | |
| 944 | BORDETELLA | QRPLRMFLGPKQ | 1827 | AAA22983.1 |
| | PERTUSSIS | | | |
| 945 | BORDETELLA | RAVFMQQRPLRM | 1828 | AAA22983.1 |
| | PERTUSSIS | | | |
| 946 | BORDETELLA | RMFLGPKQLTFE | 1829 | AAA22983.1 |
| | PERTUSSIS | | | |
| 947 | BORDETELLA | RMLVCGIAAKLG | 1830 | AAA22983.1 |
| | PERTUSSIS | | | |
| 948 | BORDETELLA | RMVECSGKQDCP | 1831 | AAA22983.1 |
| | PERTUSSIS | | | |
| 949 | BORDETELLA | SPDAHVPFCFGK | 1832 | AAA22983.1 |
| | PERTUSSIS | | | |
| 950 | BORDETELLA | SSPMEVMLRAVF | 1833 | AAA22983.1 |
| | PERTUSSIS | | | |
| 951 | BORDETELLA | SSPMEVMLRAVFMQQRPLRMFLGPK | 1834 | AAA22983.1 |
| | PERTUSSIS | | | |
| 952 | BORDETELLA | SVAMKPYEVTPT | 1835 | AAA22983.1 |
| | PERTUSSIS | | | |
| 953 | BORDETELLA | VECSGKQDCP | 1836 | AAA22983.1 |
| | PERTUSSIS | | | |
| 954 | BORDETELLA | VFMQQRPLRMFL | 1837 | AAA22983.1 |
| | PERTUSSIS | | | |
| 955 | BORDETELLA | VFMQQRPLRMFLGPKQLTFEGKPAL | 1838 | AAA22983.1 |
| | PERTUSSIS | | | |
| 956 | BORDETELLA | VKTNMVVTSVAM | 1839 | AAA22983.1 |
| | PERTUSSIS | | | |
| 957 | BORDETELLA | VLVKTNMVVTSV | 1840 | AAA22983.1 |
| | PERTUSSIS | | | |
| 958 | BORDETELLA | VTPTRMLVCGIA | 1841 | AAA22983.1 |
| | PERTUSSIS | | | |
| 959 | BORDETELLA | VTSVAMKPYEVT | 1842 | AAA22983.1 |
| | PERTUSSIS | | | |
| 960 | BORDETELLA | YEVTPTRMLVCG | 1843 | AAA22983.1 |
| | PERTUSSIS | | | |
| 961 | BORDETELLA | YEVTPTRMLVCGIAAKLGAAASSPD | 1844 | AAA22983.1 |
| | PERTUSSIS | | | |
| 962 | BORDETELLA | CASPYEGRYRDMYDALR | 1845 | P04979.1 |
| | PERTUSSIS | | | |
| 963 | BORDETELLA | CAVFVRDGQSV | 1846 | P04979.1 |
| | PERTUSSIS | | | |
| 964 | BORDETELLA | CITTIYKTG | 1847 | P04979.1 |
| | PERTUSSIS | | | |
| 965 | BORDETELLA | CPNGTRALTV | 1848 | P04979.1 |
| | PERTUSSIS | | | |
| 966 | BORDETELLA | DALRRLLYMIYMSG | 1849 | P04979.1 |
| | PERTUSSIS | | | |
| 967 | RUBELLA VIRUS | GNRGRGQRRDWSRAPPPPEERQETRS | 1850 | P07566.1 |
| | STRAIN THERIEN | | | |
| 968 | BORDETELLA | GQPAADHYYSKVT | 1851 | P04979.1 |
| | PERTUSSIS | | | |
| 969 | RUBELLA VIRUS | GSPNCHGPDWASPVCQRHS | 1852 | ABD64214.1 |
| 970 | MEASLES VIRUS | HKSLSTNLDVTNSIEHQ | 1853 | P08362.1 |
| | STRAIN | | | |
| | EDMONSTON | | | |
| 971 | BORDETELLA | LFTQQGGAYGRC | 1854 | P04979.1 |
| | PERTUSSIS | | | |
| 972 | MEASLES VIRUS | LIGLLAIAGIRLHRAAIYTAEI | 1855 | P08362.1 |
| | STRAIN | | | |
| | EDMONSTON | | | |
| 973 | MEASLES | PDTAADSELRRWIKY | 1856 | ABI54110.1 |
| | MORBILLIVIRUS | | | |
| 974 | RUBELLA VIRUS | PNCHGPDWASPVCQRHS | 1857 | P07566.1 |
| | STRAIN THERIEN | | | |
| 975 | RUBELLA VIRUS | QTPAPKPSRAPPQQPQPPRMQTGR | 1858 | ABD64216.1 |
| 976 | RUBELLA VIRUS | RAGLTAGASQSRRPRPPR | 1859 | CAA33016.1 |
| | VACCINE STRAIN | | | |
| | RA27/3 | | | |
| 977 | RUBELLA VIRUS | RFGAPQAFLAGLLLAAVAVGTARA | 1860 | ABD64214.1 |
| | VACCINE STRAIN | | | |
| | RA27/3 | | | |
| 978 | BORDETELLA | RGNAELQTYLRQITPG | 1861 | P04979.1 |
| | PERTUSSIS | | | |
| 979 | BORDETELLA | RVHVSKEEQYYDYED | 1862 | P04979.1 |
| | PERTUSSIS | | | |
| 980 | BORDETELLA | SIYGLYDGTYL | 1863 | P04979.1 |
| | PERTUSSIS | | | |
| 981 | BORDETELLA | SKVTATRLLASTNS | 1864 | P04979.1 |
| | PERTUSSIS | | | |
| 982 | BORDETELLA | TQQGGAYGRCPNGTRA | 1865 | P04979.1 |
| | PERTUSSIS | | | |
| 983 | BORDETELLA | VAPGIVIPPKAL | 1866 | P04979.1 |
| | PERTUSSIS | | | |
| 984 | BORDETELLA | DSRPPEDVFQNGFTAWG | 1867 | ACI04548.1 |
| | PERTUSSIS | | | |
| 985 | BORDETELLA | EHRMQEAVEAERAGR | 1868 | ACI04548.1 |
| | PERTUSSIS | | | |
| 986 | MEASLES VIRUS | ETCFQQACKGKIQALCENPEWA | 1869 | P08362.1 |
| | STRAIN | | | |
| | EDMONSTON | | | |
| 987 | BORDETELLA | EYVDTYGDNAGRILAGALATYQ | 1870 | ACI04548.1 |
| | PERTUSSIS | | | |
| 988 | BORDETELLA | HRRIPPENIRRVTR | 1871 | ACI04548.1 |
| | PERTUSSIS | | | |
| 989 | BORDETELLA | MARQAESSE | 1872 | ACI04548.1 |
| | PERTUSSIS | | | |
| 990 | BORDETELLA | MQEAVEAERAGR | 1873 | ACI04548.1 |
| | PERTUSSIS | | | |
| 991 | BORDETELLA | SQQTRANPNPYTSRR | 1874 | ACI04548.1 |
| | PERTUSSIS | | | |
| 992 | BORDETELLA | TRANPNPYTSRRSVASIVGTLVHG | 1875 | SRC280066 |
| | PERTUSSIS | | | |
| 993 | BORDETELLA | TVYRYDSRPPED | 1876 | ACI04548.1 |
| | PERTUSSIS | | | |
| 994 | MEASLES | NDRNLLD | 1877 | P10050.1 |
| | MORBILLIVIRUS | | | |
| 995 | MEASLES | NMEDEADQYFSHDDPISSDQSRFGWFENK | 1878 | P04851.1 |
| | MORBILLIVIRUS | | | |
| 996 | MEASLES | SRASDARAAHLPTGTPLDID | 1879 | P04851.1 |
| | MORBILLIVIRUS | | | |
| 997 | BORDETELLA | EDVFQNGFTAW | 1880 | ACI04548.1 |
| | PERTUSSIS | | | |
| 998 | CORYNEBACTERIUM | AEGSSSVEYINNWEQAK | 1881 | AAV70486.1 |
| | DIPHTHERIAE | | | |
| 999 | CORYNEBACTERIUM | GPIKNKMSESPNKT | 1882 | AAV70486.1 |
| | DIPHTHERIAE | | | |
| 1000 | MEASLES VIRUS | GPKLTGALIGILSLFVESPGQLIQRITDDP | 1883 | P10050.1 |
| | STRAIN HALLE | DV | | |
| 1001 | CORYNEBACTERIUM | GYQKTVDHTKVNSK | 1884 | AAV70486.1 |
| | DIPHTHERIAE | | | |
| 1002 | CORYNEBACTERIUM | KTVDH | 1885 | AAV70486.1 |
| | DIPHTHERIAE | | | |
| 1003 | CORYNEBACTERIUM | SESPNK | 1886 | AAV70486.1 |
| | DIPHTHERIAE | | | |
| 1004 | CORYNEBACTERIUM | AEGSSSVEYINNWEQAKALS | 1887 | AAV70486.1 |
| | DIPHTHERIAE | | | |
| 1005 | CORYNEBACTERIUM | AQAIPLVGELVDIGFAAYNF | 1888 | AAV70486.1 |
| | DIPHTHERIAE | | | |
| 1006 | CORYNEBACTERIUM | ASRVVLSLPFAEGSSSVEYI | 1889 | AAV70486.1 |
| | DIPHTHERIAE | | | |
| 1007 | CORYNEBACTERIUM | CINLDWDVIRDKTKTKIESL | 1890 | AAV70486.1 |
| | DIPHTHERIAE | | | |
| 1008 | CORYNEBACTERIUM | CRAIDGDVTFCRPKSPVYVG | 1891 | AAV70486.1 |
| | DIPHTHERIAE | | | |
| 1009 | CORYNEBACTERIUM | CRPKSPVYVGNGVHANLHVA | 1892 | AAV70486.1 |
| | DIPHTHERIAE | | | |
| 1010 | CORYNEBACTERIUM | DAAGYSVDNENPLSGKAGGV | 1893 | AAV70486.1 |
| | DIPHTHERIAE | | | |
| 1011 | CORYNEBACTERIUM | DKTKTKIESLKEHGPIKNKM | 1894 | AAV70486.1 |
| | DIPHTHERIAE | | | |
| 1012 | CORYNEBACTERIUM | EEFIKRFGDGASRVVLSLPF | 1895 | AAV70486.1 |
| | DIPHTHERIAE | | | |
| 1013 | CORYNEBACTERIUM | EKAKQYLEEFHQTALEHPEL | 1896 | AAV70486.1 |
| | DIPHTHERIAE | | | |
| 1014 | CORYNEBACTERIUM | FHRSSSEKIHSNEISSDSIG | 1897 | AAV70486.1 |
| | DIPHTHERIAE | | | |
| 1015 | CORYNEBACTERIUM | GADDVVDSSKSFVMENFSSY | 1898 | CAE11230.1 |
| | DIPHTHERIAE | | | |
| 1016 | CORYNEBACTERIUM | GKRGQDAMYEYMAQACAGNR | 1899 | AAV70486.1 |
| | DIPHTHERIAE | | | |
| 1017 | CORYNEBACTERIUM | GSVMGIADGAVHHNTEEIVA | 1900 | AAV70486.1 |
| | DIPHTHERIAE | | | |
| 1018 | CORYNEBACTERIUM | GTQGNYDDDWKGFYSTDNKY | 1901 | AAV70486.1 |
| | DIPHTHERIAE | | | |
| 1019 | CORYNEBACTERIUM | HDGYAVSWNTVEDSIIRTGF | 1902 | AAV70486.1 |
| | DIPHTHERIAE | | | |
| 1020 | CORYNEBACTERIUM | HGTKPGYVDSIQKGIQKPKS | 1903 | AAV70486.1 |
| | DIPHTHERIAE | | | |
| 1021 | CORYNEBACTERIUM | HQTALEHPELSELKTVTGTN | 1904 | AAV70486.1 |
| | DIPHTHERIAE | | | |
| 1022 | CORYNEBACTERIUM | IQKGIQKPKSGTQGNYDDDW | 1905 | AAV70486.1 |
| | DIPHTHERIAE | | | |
| 1023 | CORYNEBACTERIUM | KEHGPIKNKMSESPNKTVSE | 1906 | AAV70486.1 |
| | DIPHTHERIAE | | | |
| 1024 | CORYNEBACTERIUM | KGFYSTDNKYDAAGYSVDNE | 1907 | AAV70486.1 |
| | DIPHTHERIAE | | | |
| 1025 | CORYNEBACTERIUM | LDVNKSKTHISVNGRKIRMR | 1908 | AAV70486.1 |
| | DIPHTHERIAE | | | |
| 1026 | RUBELLA VIRUS | MASTIPITMEDLQKALEA | 1909 | SRC265968 |
| 1027 | CORYNEBACTERIUM | NGVHANLHVAFHRSSSEKIH | 1910 | AAV70486.1 |
| | DIPHTHERIAE | | | |
| 1028 | CORYNEBACTERIUM | NNWEQAKALSVELEINFETR | 1911 | AAV70486.1 |
| | DIPHTHERIAE | | | |
| 1029 | CORYNEBACTERIUM | NPLSGKAGGVVKVTYPGLTK | 1912 | AAV70486.1 |
| | DIPHTHERIAE | | | |
| 1030 | CORYNEBACTERIUM | PVFAGANYAAWAVNVAQVID | 1913 | AAV70486.1 |
| | DIPHTHERIAE | | | |
| 1031 | CORYNEBACTERIUM | SELKTVTGTNPVFAGANYAA | 1914 | AAV70486.1 |
| | DIPHTHERIAE | | | |
| 1032 | CORYNEBACTERIUM | SESPNKTVSEEKAKQYLEEF | 1915 | AAV70486.1 |
| | DIPHTHERIAE | | | |
| 1033 | CORYNEBACTERIUM | SETADNLEKTTAALSILPGI | 1916 | AAV70486.1 |
| | DIPHTHERIAE | | | |
| 1034 | CORYNEBACTERIUM | SFVMENFSSYHGTKPGYVDS | 1917 | AAV70486.1 |
| | DIPHTHERIAE | | | |
| 1035 | CORYNEBACTERIUM | SNEISSDSIGVLGYQKTVDH | 1918 | AAV70486.1 |
| | DIPHTHERIAE | | | |
| 1036 | CORYNEBACTERIUM | SPGHKTQPFLHDGYAVSWNT | 1919 | AAV70486.1 |
| | DIPHTHERIAE | | | |
| 1037 | CORYNEBACTERIUM | SVNGRKIRMRCRAIDGDVTF | 1920 | AAV70486.1 |
| | DIPHTHERIAE | | | |
| 1038 | CORYNEBACTERIUM | TAALSILPGIGSVMGIADGA | 1921 | AAV70486.1 |
| | DIPHTHERIAE | | | |
| 1039 | CORYNEBACTERIUM | TAENTPLPIAGVLLPTIPGK | 1922 | AAV70486.1 |
| | DIPHTHERIAE | | | |
| 1040 | CORYNEBACTERIUM | TEPLMEQVGTEEFIKRFGDG | 1923 | AAV70486.1 |
| | DIPHTHERIAE | | | |
| 1041 | CORYNEBACTERIUM | TIKKELGLSLTEPLMEQVGT | 1924 | AAV70486.1 |
| | DIPHTHERIAE | | | |
| 1042 | CORYNEBACTERIUM | TKVNSKLSLFFEIKS | 1925 | AAV70486.1 |
| | DIPHTHERIAE | | | |
| 1043 | CORYNEBACTERIUM | VEDSIIRTGFQGESGHDIKI | 1926 | AAV70486.1 |
| | DIPHTHERIAE | | | |
| 1044 | CORYNEBACTERIUM | VELEINFETRGKRGQDAMYE | 1927 | AAV70486.1 |
| | DIPHTHERIAE | | | |
| 1045 | CORYNEBACTERIUM | VESIINLFQVVHNSYNRPAY | 1928 | AAV70486.1 |
| | DIPHTHERIAE | | | |
| 1046 | CORYNEBACTERIUM | VHNSYNRPAYSPGHKTQPFL | 1929 | AAV70486.1 |
| | DIPHTHERIAE | | | |
| 1047 | CORYNEBACTERIUM | VKVTYPGLTKVLALKVDNAE | 1930 | AAV70486.1 |
| | DIPHTHERIAE | | | |
| 1048 | CORYNEBACTERIUM | VLALKVDNAETIKKELGLSL | 1931 | AAV70486.1 |
| | DIPHTHERIAE | | | |
| 1049 | CORYNEBACTERIUM | VLGYQKTVDHTKVNSKLSLF | 1932 | AAV70486.1 |
| | DIPHTHERIAE | | | |
| 1050 | CORYNEBACTERIUM | VRRSVGSSLSCINLDWDVIR | 1933 | AAV70486.1 |
| | DIPHTHERIAE | | | |
| 1051 | CORYNEBACTERIUM | WAVNVAQVIDSETADNLEKT | 1934 | AAV70486.1 |
| | DIPHTHERIAE | | | |
| 1052 | CORYNEBACTERIUM | YMAQACAGNRVRRSVGSSLS | 1935 | AAV70486.1 |
| | DIPHTHERIAE | | | |
| 1053 | BORDETELLA | AKAPPAPKPAPQPGP | 1936 | ABO77783.1 |
| | PERTUSSIS | | | |
| 1054 | BORDETELLA | APKPAPQPGP | 1937 | ABO77783.1 |
| | PERTUSSIS | | | |
| 1055 | BORDETELLA | APKPAPQPGPQPPQP | 1938 | ABO77783.1 |
| | PERTUSSIS | | | |
| 1056 | MEASLES VIRUS | AQTRTPLQCTMTEIF | 1939 | P04851.1 |
| | STRAIN | | | |
| | EDMONSTON | | | |
| 1057 | MEASLES VIRUS | ASRGTNMEDEADQYFSHDD | 1940 | P04851.1 |
| | STRAIN | | | |
| | EDMONSTON | | | |
| 1058 | BORDETELLA | ATIRR | 1941 | ABO77783.1 |
| | PERTUSSIS | | | |
| 1059 | BORDETELLA | DNRAG | 1942 | ABO77783.1 |
| | PERTUSSIS | | | |
| 1060 | BORDETELLA | EAPAPQPPAGRELSA | 1943 | ABO77783.1 |
| | PERTUSSIS | | | |
| 1061 | MEASLES VIRUS | EMVRRSAGKVSSTLASELGI | 1944 | P04851.1 |
| | STRAIN | | | |
| | EDMONSTON | | | |
| 1062 | BORDETELLA | GASEL | 1945 | ABO77783.1 |
| | PERTUSSIS | | | |
| 1063 | BORDETELLA | GDALAGGAVP | 1946 | AAA22980.1 |
| | PERTUSSIS | | | |
| 1064 | BORDETELLA | GDAPAGGAVP | 1947 | ABO77783.1 |
| | PERTUSSIS | | | |
| 1065 | BORDETELLA | GDTWDDD | 1948 | ABO77783.1 |
| | PERTUSSIS | | | |
| 1066 | BORDETELLA | GERQH | 1949 | ABO77783.1 |
| | PERTUSSIS | | | |
| 1067 | BORDETELLA | GGAVP | 1950 | ABO77783.1 |
| | PERTUSSIS | | | |
| 1068 | BORDETELLA | GGFGP | 1951 | P14283.3 |
| | PERTUSSIS | | | |
| 1069 | BORDETELLA | GGFGPGGFGP | 1952 | BAF35031.1 |
| | PERTUSSIS | | | |
| 1070 | BORDETELLA | GGFGPVLDGW | 1953 | ABO77783.1 |
| | PERTUSSIS | | | |
| 1071 | MEASLES VIRUS | GGKEDRRVKQSRGEARESYR | 1954 | P04851.1 |
| | STRAIN | | | |
| | EDMONSTON | | | |
| 1072 | BORDETELLA | GILLEN | 1955 | ABO77783.1 |
| | PERTUSSIS | | | |
| 1073 | BORDETELLA | GIRRFL | 1956 | ABO77783.1 |
| | PERTUSSIS | | | |
| 1074 | MEASLES VIRUS | HDDPISSDQSRFGWFENKEI | 1957 | P04851.1 |
| | STRAIN | | | |
| | EDMONSTON | | | |
| 1075 | MEASLES VIRUS | HEFAGELSTLESLMNLY | 1958 | P04851.1 |
| | STRAIN | | | |
| | EDMONSTON | | | |
| 1076 | BORDETELLA | HLGGLAGY | 1959 | ABO77783.1 |
| | PERTUSSIS | | | |
| 1077 | MEASLES VIRUS | HTTEDKISRAVGPRQAQVSFL | 1960 | P04851.1 |
| | STRAIN | | | |
| | EDMONSTON | | | |
| 1078 | MEASLES VIRUS | ICDIDTYIVEAGLASFILTI | 1961 | P04851.1 |
| | STRAIN | | | |
| | EDMONSTON | | | |
| 1079 | MEASLES VIRUS | IIIVPIPGDSSITTRSRLLD | 1962 | P04851.1 |
| | STRAIN | | | |
| | EDMONSTON | | | |
| 1080 | MEASLES VIRUS | ILDIKRTPGNKPRIAEMICD | 1963 | P04851.1 |
| | STRAIN | | | |
| | EDMONSTON | | | |
| 1081 | BORDETELLA | KALLYR | 1964 | ABO77783.1 |
| | PERTUSSIS | | | |
| 1082 | MEASLES VIRUS | KPPITSGSGGAIRGIKHIII | 1965 | P04851.1 |
| | STRAIN | | | |
| | EDMONSTON | | | |
| 1083 | BORDETELLA | LAGSGL | 1966 | ABO77783.1 |
| | PERTUSSIS | | | |
| 1084 | MEASLES VIRUS | LGITAEDARLVSEIAMHTTE | 1967 | P04851.1 |
| | STRAIN | | | |
| | EDMONSTON | | | |
| 1085 | MEASLES VIRUS | LGTILAQIWVLLAKAVTA | 1968 | P04851.1 |
| | STRAIN | | | |
| | EDMONSTON | | | |
| 1086 | MEASLES VIRUS | LPTGTPLDIDTASESSQD | 1969 | P04851.1 |
| | STRAIN | | | |
| | EDMONSTON | | | |
| 1087 | MEASLES VIRUS | MATLLRSLALFKRNKDK | 1970 | P04851.1 |
| | STRAIN | | | |
| | EDMONSTON | | | |
| 1088 | BORDETELLA | PAPQPP | 1971 | ABO77783.1 |
| | PERTUSSIS | | | |
| 1089 | MEASLES VIRUS | PDTAADSELRRWIKYTQQRR | 1972 | P04851.1 |
| | STRAIN | | | |
| | EDMONSTON | | | |
| 1090 | MEASLES VIRUS | PKLTGALIGILSLFVESPGQ | 1973 | P04851.1 |
| | STRAIN | | | |
| | EDMONSTON | | | |
| 1091 | BORDETELLA | PQP | 1974 | ABO77783.1 |
| | PERTUSSIS | | | |
| 1092 | BORDETELLA | PQPGP | 1975 | ABO77783.1 |
| | PERTUSSIS | | | |
| 1093 | BORDETELLA | PQPGPQPPQPPQPQP | 1976 | ABO77783.1 |
| | PERTUSSIS | | | |
| 1094 | MEASLES VIRUS | QDPQDSRRSAEPLLSCKPWQ | 1977 | P04851.1 |
| | STRAIN | | | |
| | EDMONSTON | | | |
| 1095 | MEASLES VIRUS | QRRVVGEFRLERKWLDVVR | 1978 | P04851.1 |
| | STRAIN | | | |
| | EDMONSTON | | | |
| 1096 | BORDETELLA | RELSA | 1979 | ABO77783.1 |
| | PERTUSSIS | | | |
| 1097 | BORDETELLA | RFAPQ | 1980 | ABO77783.1 |
| | PERTUSSIS | | | |
| 1098 | MEASLES VIRUS | SIQNKFSAGSYPLLWSYAMG | 1981 | P04851.1 |
| | STRAIN | | | |
| | EDMONSTON | | | |
| 1099 | BORDETELLA | SITLQAGAH | 1982 | ABO77783.1 |
| | PERTUSSIS | | | |
| 1100 | BORDETELLA | SLQPED | 1983 | ABO77783.1 |
| | PERTUSSIS | | | |
| 1101 | BORDETELLA | SNALSKRL | 1984 | ABO77783.1 |
| | PERTUSSIS | | | |
| 1102 | MEASLES VIRUS | SPGQLIQRITDDPDVSIRLL | 1985 | P04851.1 |
| | STRAIN | | | |
| | EDMONSTON | | | |
| 1103 | BORDETELLA | TELPSIPG | 1986 | ABO77783.1 |
| | PERTUSSIS | | | |
| 1104 | BORDETELLA | TFTLANK | 1987 | ABO77783.1 |
| | PERTUSSIS | | | |
| 1105 | BORDETELLA | TWDDD | 1988 | ABO77783.1 |
| | PERTUSSIS | | | |
| 1106 | MEASLES VIRUS | VSFLQGDQSENELPRLGGKE | 1989 | P04851.1 |
| | STRAIN | | | |
| | EDMONSTON | | | |
| 1107 | MEASLES VIRUS | WQESRKNKAQTRTPLQC | 1990 | P04851.1 |
| | STRAIN | | | |
| | EDMONSTON | | | |
| 1108 | MEASLES VIRUS | YAMGVGVELENSMGGLNFGR | 1991 | P04851.1 |
| | STRAIN | | | |
| | EDMONSTON | | | |
| 1109 | MEASLES VIRUS | YQQMGKPAPYMVNLENSI | 1992 | P04851.1 |
| | STRAIN | | | |
| | EDMONSTON | | | |
| 1110 | MEASLES VIRUS | MTRSSHQSLVIKLMP | 1993 | P69355.1 |
| | STRAIN HALLE | | | |
| 1111 | MEASLES VIRUS | PIRDALNAMTQNIRP | 1994 | P69355.1 |
| | STRAIN HALLE | | | |
| 1112 | RUBELLA VIRUS | ALLNTPPPYQVSCGGESDRASAGH | 1995 | CAA28880.1 |
| | STRAIN M33 | | | |
| 1113 | RUBELLA VIRUS | GLGSPNCHGPDWASPVCQRHS | 1996 | P07566.1 |
| | STRAIN THERIEN | | | |
| 1114 | RUBELLA VIRUS | GLGSPNCHGPDWASPVCQRHSPDCSRLV | 1997 | P07566.1 |
| | STRAIN THERIEN | | | |
| 1115 | RUBELLA VIRUS | NYTGNQQSRWGLGSPNCHGPDWASPV | 1998 | P07566.1 |
| | STRAIN THERIEN | | | |
| 1116 | RUBELLA VIRUS | TLPQPPCAHGQHYGHHHHQL | 1999 | P07566.1 |
| | STRAIN THERIEN | | | |
| 1117 | RUBELLA VIRUS | TVRVKFHTETRTVWQLSVAGVSCNVT | 2000 | P07566.1 |
| | STRAIN THERIEN | | | |
| 1118 | RUBELLA VIRUS | ASYFNPGGSYYKQYH | 2001 | BAA28178.1 |
| 1119 | RUBELLA VIRUS | FALASYVQHPHKTVR | 2002 | BAA28178.1 |
| 1120 | RUBELLA VIRUS | GGESDRASARVIDPAAQSFTG | 2003 | BAA28178.1 |
| 1121 | RUBELLA VIRUS | GPGEVWVTPVIGSQARKC | 2004 | BAA28178.1 |
| 1122 | RUBELLA VIRUS | GSQARKCGLHIRAG | 2005 | BAA28178.1 |
| 1123 | RUBELLA VIRUS | LVGATPERPRLRLVDADDPLLRTAP | 2006 | BAA28178.1 |
| 1124 | RUBELLA VIRUS | TAPGPGEVWVTPVI | 2007 | BAA28178.1 |
| 1125 | MEASLES | FIVLSIAYPTLSEIK | 2008 | AAL29688.1 |
| | MORBILLIVIRUS | | | |
| 1126 | MEASLES VIRUS | ETCFQQACKGKIQALCENPEWAPLKDNRIP | 2009 | P08362.1 |
| | STRAIN | SY | | |
| | EDMONSTON- | | | |
| | ZAGREB | | | |
| 1127 | MEASLES | LPRLGGKEDR | 2010 | P04851.1 |
| | MORBILLIVIRUS | | | |
| 1128 | MEASLES | MSKTEWNASQ | 2011 | SRC280080 |
| | MORBILLIVIRUS | | | |
| 1129 | MEASLES | SRFGWFENKE | 2012 | P04851.1 |
| | MORBILLIVIRUS | | | |
| 1130 | RUBELLA VIRUS | EACVTSWLWSEGEGAVFYRVDLHFINLGT | 2013 | CAA28880.1 |
| 1131 | RUBELLA VIRUS | MDFWCVEHDRPPPATPTSLTT | 2014 | CAA33016.1 |
| 1132 | RUBELLA VIRUS | PFLGHDGHHGGTLRVGQHHRNASDV | 2015 | CAA33016.1 |
| 1133 | RUBELLA VIRUS | RVKFHTETRTVWQLSVAGVSC | 2016 | BAA19893.1 |
| 1134 | MEASLES | AEEQARHVKNGLE | 2017 | ABO69699.1 |
| | MORBILLIVIRUS | | | |
| 1135 | MEASLES | ESPQEISKHQALG | 2018 | SRC280080 |
| | MORBILLIVIRUS | | | |
| 1136 | MEASLES | GVGVELENSMGGLNF | 2019 | ABI54110.1 |
| | MORBILLIVIRUS | | | |
| 1137 | MEASLES | IKGANDLAKFHQMLMKIIMK | 2020 | ABO69699.1 |
| | MORBILLIVIRUS | | | |
| 1138 | MEASLES | MSKTLHAQLGFKKT | 2021 | ABK40528.1 |
| | MORBILLIVIRUS | | | |
| 1139 | MEASLES | NASGLSRPSPSAH | 2022 | BAE98296.1 |
| | MORBILLIVIRUS | | | |
| 1140 | MEASLES | VRVIDPSLGDRKDE | 2023 | SRC280148 |
| | MORBILLIVIRUS | | | |
| 1141 | BORDETELLA | DLSDGDLLV | 2024 | AAC31207.1 |
| | PERTUSSIS | | | |
| 1142 | BORDETELLA | EAERAGRGTG | 2025 | ACI04548.1 |
| | PERTUSSIS | | | |
| 1143 | BORDETELLA | YRYDSRPPEDV | 2026 | ACI04548.1 |
| | PERTUSSIS | | | |
| 1144 | BORDETELLA | YVDTYGDNAG | 2027 | ACI04548.1 |
| | PERTUSSIS | | | |
| 1145 | MEASLES | SFSYFYPFR | 2028 | CAB43772.1 |
| | MORBILLIVIRUS | | | |
| 1146 | MUMPS | DIFIVSPR | 2029 | ADF49557.1 |
| | RUBULAVIRUS | | | |
| 1147 | MEASLES | QDSRRSADALLRLQAMAGISEEQGSDTDTP | 2030 | CAA59302.1 |
| | MORBILLIVIRUS | IVYNDRN | | |
| 1148 | MEASLES | SAEALLRLQA | 2031 | BAH22350.1 |
| | MORBILLIVIRUS | | | |
| 1149 | MEASLES | RIVINREHL | 2032 | BAB39835.1 |
| | MORBILLIVIRUS | | | |
| 1150 | MEASLES VIRUS | IPRFK | 2033 | BAB39848.1 |
| | GENOTYPE A | | | |
| 1151 | BORDETELLA | AAALSPMEI | 2034 | P15318.2 |
| | PERTUSSIS | | | |
| 1152 | BORDETELLA | AAASVVGAPV | 2035 | P15318.2 |
| | PERTUSSIS | | | |
| 1153 | BORDETELLA | AALGRQDSI | 2036 | P15318.2 |
| | PERTUSSIS | | | |
| 1154 | BORDETELLA | AAQRLVHAIA | 2037 | P15318.2 |
| | PERTUSSIS | | | |
| 1155 | BORDETELLA | AAVEAAEL | 2038 | P15318.2 |
| | PERTUSSIS | | | |
| 1156 | BORDETELLA | AGANVLNGL | 2039 | P15318.2 |
| | PERTUSSIS | | | |
| 1157 | BORDETELLA | AGYANAAD | 2040 | P15318.2 |
| | PERTUSSIS | | | |
| 1158 | BORDETELLA | AGYEQFEFRV | 2041 | P15318.2 |
| | PERTUSSIS | | | |
| 1159 | BORDETELLA | AITGNADNL | 2042 | P15318.2 |
| | PERTUSSIS | | | |
| 1160 | BORDETELLA | AKEKNATLM | 2043 | P15318.2 |
| | PERTUSSIS | | | |
| 1161 | BORDETELLA | AKGVFLSL | 2044 | P15318.2 |
| | PERTUSSIS | | | |
| 1162 | BORDETELLA | APHEYGFGI | 2045 | P15318.2 |
| | PERTUSSIS | | | |
| 1163 | BORDETELLA | ARQGNDLEI | 2046 | P15318.2 |
| | PERTUSSIS | | | |
| 1164 | BORDETELLA | ASVVGAPV | 2047 | P15318.2 |
| | PERTUSSIS | | | |
| 1165 | BORDETELLA | ATLMFRLV | 2048 | P15318.2 |
| | PERTUSSIS | | | |
| 1166 | BORDETELLA | AVAAAQRL | 2049 | P15318.2 |
| | PERTUSSIS | | | |
| 1167 | BORDETELLA | DAGANVLNGL | 2050 | P15318.2 |
| | PERTUSSIS | | | |
| 1168 | BORDETELLA | DALLAQLYR | 2051 | P15318.2 |
| | PERTUSSIS | | | |
| 1169 | BORDETELLA | DANGVLKHSI | 2052 | P15318.2 |
| | PERTUSSIS | | | |
| 1170 | BORDETELLA | DGDMNIGVI | 2053 | P15318.2 |
| | PERTUSSIS | | | |
| 1171 | BORDETELLA | DHVKNIENL | 2054 | P15318.2 |
| | PERTUSSIS | | | |
| 1172 | BORDETELLA | DIDMFAIM | 2055 | P15318.2 |
| | PERTUSSIS | | | |
| 1173 | BORDETELLA | DMFAIMPHL | 2056 | P15318.2 |
| | PERTUSSIS | | | |
| 1174 | BORDETELLA | DNVRNVENV | 2057 | P15318.2 |
| | PERTUSSIS | | | |
| 1175 | BORDETELLA | DNVRNVENVI | 2058 | P15318.2 |
| | PERTUSSIS | | | |
| 1176 | BORDETELLA | DTVDYSAM | 2059 | P15318.2 |
| | PERTUSSIS | | | |
| 1177 | BORDETELLA | DTVDYSAMI | 2060 | P15318.2 |
| | PERTUSSIS | | | |
| 1178 | BORDETELLA | DYLRQAGL | 2061 | P15318.2 |
| | PERTUSSIS | | | |
| 1179 | BORDETELLA | DYYDNVRNV | 2062 | P15318.2 |
| | PERTUSSIS | | | |
| 1180 | BORDETELLA | EFTTFVEI | 2063 | P15318.2 |
| | PERTUSSIS | | | |
| 1181 | BORDETELLA | EFTTFVEIV | 2064 | P15318.2 |
| | PERTUSSIS | | | |
| 1182 | BORDETELLA | EGYVFYEN | 2065 | P15318.2 |
| | PERTUSSIS | | | |
| 1183 | BORDETELLA | ENVQYRHV | 2066 | P15318.2 |
| | PERTUSSIS | | | |
| 1184 | BORDETELLA | EQLANSDGL | 2067 | P15318.2 |
| | PERTUSSIS | | | |
| 1185 | BORDETELLA | FGVGYGHDTI | 2068 | P15318.2 |
| | PERTUSSIS | | | |
| 1186 | BORDETELLA | FSPDVLETVP | 2069 | P15318.2 |
| | PERTUSSIS | | | |
| 1187 | BORDETELLA | FSVDHVKNI | 2070 | P15318.2 |
| | PERTUSSIS | | | |
| 1188 | BORDETELLA | GDDTYLFGV | 2071 | P15318.2 |
| | PERTUSSIS | | | |
| 1189 | BORDETELLA | GDDVFLQDL | 2072 | P15318.2 |
| | PERTUSSIS | | | |
| 1190 | BORDETELLA | GEDGNDIFL | 2073 | P15318.2 |
| | PERTUSSIS | | | |
| 1191 | BORDETELLA | GERFNVRKQL | 2074 | P15318.2 |
| | PERTUSSIS | | | |
| 1192 | BORDETELLA | GGAGNDTLV | 2075 | P15318.2 |
| | PERTUSSIS | | | |
| 1193 | BORDETELLA | GGDDFEAV | 2076 | P15318.2 |
| | PERTUSSIS | | | |
| 1194 | BORDETELLA | GKSEFTTFV | 2077 | P15318.2 |
| | PERTUSSIS | | | |
| 1195 | BORDETELLA | GKSLFDDGL | 2078 | P15318.2 |
| | PERTUSSIS | | | |
| 1196 | BORDETELLA | GNADNLKSV | 2079 | P15318.2 |
| | PERTUSSIS | | | |
| 1197 | BORDETELLA | GQLVEVDTL | 2080 | P15318.2 |
| | PERTUSSIS | | | |
| 1198 | BORDETELLA | GRSKFSPDV | 2081 | P15318.2 |
| | PERTUSSIS | | | |
| 1199 | BORDETELLA | GSSAYDTV | 2082 | P15318.2 |
| | PERTUSSIS | | | |
| 1200 | BORDETELLA | GTVEKWPAL | 2083 | P15318.2 |
| | PERTUSSIS | | | |
| 1201 | BORDETELLA | GVDYYDNV | 2084 | P15318.2 |
| | PERTUSSIS | | | |
| 1202 | BORDETELLA | GYEQFEFRV | 2085 | P15318.2 |
| | PERTUSSIS | | | |
| 1203 | BORDETELLA | HAVGAQDVV | 2086 | P15318.2 |
| | PERTUSSIS | | | |
| 1204 | BORDETELLA | IAAGRIGLGI | 2087 | P15318.2 |
| | PERTUSSIS | | | |
| 1205 | BORDETELLA | IGDAQANTL | 2088 | P15318.2 |
| | PERTUSSIS | | | |
| 1206 | BORDETELLA | IGLGILADL | 2089 | P15318.2 |
| | PERTUSSIS | | | |
| 1207 | BORDETELLA | IGNAAGIPL | 2090 | P15318.2 |
| | PERTUSSIS | | | |
| 1208 | BORDETELLA | IGTSMKDVL | 2091 | P15318.2 |
| | PERTUSSIS | | | |
| 1209 | BORDETELLA | IGVITDFEL | 2092 | P15318.2 |
| | PERTUSSIS | | | |
| 1210 | BORDETELLA | IPLTADIDM | 2093 | P15318.2 |
| | PERTUSSIS | | | |
| 1211 | BORDETELLA | ISKSALEL | 2094 | P15318.2 |
| | PERTUSSIS | | | |
| 1212 | BORDETELLA | ITGNADNL | 2095 | P15318.2 |
| | PERTUSSIS | | | |
| 1213 | BORDETELLA | KIFVVSAT | 2096 | P15318.2 |
| | PERTUSSIS | | | |
| 1214 | BORDETELLA | KQLNNANVYR | 2097 | P15318.2 |
| | PERTUSSIS | | | |
| 1215 | BORDETELLA | KVIGNAAGI | 2098 | P15318.2 |
| | PERTUSSIS | | | |
| 1216 | BORDETELLA | LAKVVSQL | 2099 | P15318.2 |
| | PERTUSSIS | | | |
| 1217 | BORDETELLA | LANDYARKI | 2100 | P15318.2 |
| | PERTUSSIS | | | |
| 1218 | BORDETELLA | LDYLRQAGL | 2101 | P15318.2 |
| | PERTUSSIS | | | |
| 1219 | BORDETELLA | LGKGFASL | 2102 | P15318.2 |
| | PERTUSSIS | | | |
| 1220 | BORDETELLA | LGKGFASLM | 2103 | P15318.2 |
| | PERTUSSIS | | | |
| 1221 | BORDETELLA | LGVDYYDN | 2104 | P15318.2 |
| | PERTUSSIS | | | |
| 1222 | BORDETELLA | LGVDYYDNV | 2105 | P15318.2 |
| | PERTUSSIS | | | |
| 1223 | BORDETELLA | LKHSIKLDVI | 2106 | P15318.2 |
| | PERTUSSIS | | | |
| 1224 | BORDETELLA | LQAGYIPV | 2107 | P15318.2 |
| | PERTUSSIS | | | |
| 1225 | BORDETELLA | LQLTGGTVE | 2108 | P15318.2 |
| | PERTUSSIS | | | |
| 1226 | BORDETELLA | LSAAVFGL | 2109 | P15318.2 |
| | PERTUSSIS | | | |
| 1227 | BORDETELLA | LSLGKGFASL | 2110 | P15318.2 |
| | PERTUSSIS | | | |
| 1228 | BORDETELLA | LSPMEIYGL | 2111 | P15318.2 |
| | PERTUSSIS | | | |
| 1229 | BORDETELLA | NAHDNFLAGG | 2112 | P15318.2 |
| | PERTUSSIS | | | |
| 1230 | BORDETELLA | NANVYREGV | 2113 | P15318.2 |
| | PERTUSSIS | | | |
| 1231 | BORDETELLA | NDTLYGGL | 2114 | P15318.2 |
| | PERTUSSIS | | | |
| 1232 | BORDETELLA | NGLAGNDVL | 2115 | P15318.2 |
| | PERTUSSIS | | | |
| 1233 | BORDETELLA | NNANVYREGV | 2116 | P15318.2 |
| | PERTUSSIS | | | |
| 1234 | BORDETELLA | NTVSYAAL | 2117 | P15318.2 |
| | PERTUSSIS | | | |
| 1235 | BORDETELLA | NVLRNIENAV | 2118 | P15318.2 |
| | PERTUSSIS | | | |
| 1236 | BORDETELLA | PALTFITPL | 2119 | P15318.2 |
| | PERTUSSIS | | | |
| 1237 | BORDETELLA | PETSNVLRNI | 2120 | P15318.2 |
| | PERTUSSIS | | | |
| 1238 | BORDETELLA | PMEIYGLV | 2121 | P15318.2 |
| | PERTUSSIS | | | |
| 1239 | BORDETELLA | PQAYFEKNL | 2122 | P15318.2 |
| | PERTUSSIS | | | |
| 1240 | BORDETELLA | PVNPNLSKL | 2123 | P15318.2 |
| | PERTUSSIS | | | |
| 1241 | BORDETELLA | QAGWNASSV | 2124 | P15318.2 |
| | PERTUSSIS | | | |
| 1242 | BORDETELLA | QAGWNASSVI | 2125 | P15318.2 |
| | PERTUSSIS | | | |
| 1243 | BORDETELLA | QDAANAGNL | 2126 | P15318.2 |
| | PERTUSSIS | | | |
| 1244 | BORDETELLA | QDAANAGNLL | 2127 | P15318.2 |
| | PERTUSSIS | | | |
| 1245 | BORDETELLA | QDSGYDSL | 2128 | P15318.2 |
| | PERTUSSIS | | | |
| 1246 | BORDETELLA | QQSHYADQL | 2129 | P15318.2 |
| | PERTUSSIS | | | |
| 1247 | BORDETELLA | RALQGAQAV | 2130 | P15318.2 |
| | PERTUSSIS | | | |
| 1248 | BORDETELLA | RGGLGLDTL | 2131 | P15318.2 |
| | PERTUSSIS | | | |
| 1249 | BORDETELLA | RKQLNNANV | 2132 | P15318.2 |
| | PERTUSSIS | | | |
| 1250 | BORDETELLA | RQDSGYDSL | 2133 | P15318.2 |
| | PERTUSSIS | | | |
| 1251 | BORDETELLA | RQFRYDGDM | 2134 | P15318.2 |
| | PERTUSSIS | | | |
| 1252 | BORDETELLA | RSKFSPDVL | 2135 | P15318.2 |
| | PERTUSSIS | | | |
| 1253 | BORDETELLA | SAGAAAGAL | 2136 | P15318.2 |
| | PERTUSSIS | | | |
| 1254 | BORDETELLA | SAHWGQRAL | 2137 | P15318.2 |
| | PERTUSSIS | | | |
| 1255 | BORDETELLA | SAMIHPGRI | 2138 | P15318.2 |
| | PERTUSSIS | | | |
| 1256 | BORDETELLA | SAMIHPGRIV | 2139 | P15318.2 |
| | PERTUSSIS | | | |
| 1257 | BORDETELLA | SAYDTVSGI | 2140 | P15318.2 |
| | PERTUSSIS | | | |
| 1258 | BORDETELLA | SAYGYEGD | 2141 | P15318.2 |
| | PERTUSSIS | | | |
| 1259 | BORDETELLA | SGGAGDDVL | 2142 | P15318.2 |
| | PERTUSSIS | | | |
| 1260 | BORDETELLA | SGLQVAGA | 2143 | P15318.2 |
| | PERTUSSIS | | | |
| 1261 | BORDETELLA | SGYDSLDGV | 2144 | P15318.2 |
| | PERTUSSIS | | | |
| 1262 | BORDETELLA | SLLTGALNGI | 2145 | P15318.2 |
| | PERTUSSIS | | | |
| 1263 | BORDETELLA | SPMEIYGL | 2146 | P15318.2 |
| | PERTUSSIS | | | |
| 1264 | BORDETELLA | SQMLTRGQL | 2147 | P15318.2 |
| | PERTUSSIS | | | |
| 1265 | BORDETELLA | SSAYDTVSGI | 2148 | P15318.2 |
| | PERTUSSIS | | | |
| 1266 | BORDETELLA | SSLAHGHTA | 2149 | P15318.2 |
| | PERTUSSIS | | | |
| 1267 | BORDETELLA | SSVTSGDSV | 2150 | P15318.2 |
| | PERTUSSIS | | | |
| 1268 | BORDETELLA | SVIGVQTTEI | 2151 | P15318.2 |
| | PERTUSSIS | | | |
| 1269 | BORDETELLA | TNTVSYAAL | 2152 | P15318.2 |
| | PERTUSSIS | | | |
| 1270 | BORDETELLA | TSLIAEGV | 2153 | P15318.2 |
| | PERTUSSIS | | | |
| 1271 | BORDETELLA | TSLLTGAL | 2154 | P15318.2 |
| | PERTUSSIS | | | |
| 1272 | BORDETELLA | TVPASPGL | 2155 | P15318.2 |
| | PERTUSSIS | | | |
| 1273 | BORDETELLA | VAKEKNATL | 2156 | P15318.2 |
| | PERTUSSIS | | | |
| 1274 | BORDETELLA | VAPHEYGFGI | 2157 | P15318.2 |
| | PERTUSSIS | | | |
| 1275 | BORDETELLA | VAVVTSLL | 2158 | P15318.2 |
| | PERTUSSIS | | | |
| 1276 | BORDETELLA | VFYENRAYG | 2159 | P15318.2 |
| | PERTUSSIS | | | |
| 1277 | BORDETELLA | VFYENRAYGV | 2160 | P15318.2 |
| | PERTUSSIS | | | |
| 1278 | BORDETELLA | VITDFELEV | 2161 | P15318.2 |
| | PERTUSSIS | | | |
| 1279 | BORDETELLA | VNPHSTSL | 2162 | P15318.2 |
| | PERTUSSIS | | | |
| 1280 | BORDETELLA | VNPHSTSLI | 2163 | P15318.2 |
| | PERTUSSIS | | | |
| 1281 | BORDETELLA | VNPNLSKL | 2164 | P15318.2 |
| | PERTUSSIS | | | |
| 1282 | BORDETELLA | VNPNLSKLF | 2165 | P15318.2 |
| | PERTUSSIS | | | |
| 1283 | BORDETELLA | VQQPIIEKL | 2166 | P15318.2 |
| | PERTUSSIS | | | |
| 1284 | BORDETELLA | VQYRHVEL | 2167 | P15318.2 |
| | PERTUSSIS | | | |
| 1285 | BORDETELLA | VSIAAAASV | 2168 | P15318.2 |
| | PERTUSSIS | | | |
| 1286 | BORDETELLA | VSIAAAASVV | 2169 | P15318.2 |
| | PERTUSSIS | | | |
| 1287 | BORDETELLA | VTSLLTGAL | 2170 | P15318.2 |
| | PERTUSSIS | | | |
| 1288 | BORDETELLA | VVLANASRI | 2171 | P15318.2 |
| | PERTUSSIS | | | |
| 1289 | BORDETELLA | WPALNLFSV | 2172 | P15318.2 |
| | PERTUSSIS | | | |
| 1290 | BORDETELLA | WVRKASAL | 2173 | P15318.2 |
| | PERTUSSIS | | | |
| 1291 | BORDETELLA | YAVQYRRKGG | 2174 | P15318.2 |
| | PERTUSSIS | | | |
| 1292 | BORDETELLA | YGGLGDDTL | 2175 | P15318.2 |
| | PERTUSSIS | | | |
| 1293 | BORDETELLA | YGLVQQSHYA | 2176 | P15318.2 |
| | PERTUSSIS | | | |
| 1294 | BORDETELLA | YGYEGDALL | 2177 | P15318.2 |
| | PERTUSSIS | | | |
| 1295 | BORDETELLA | YIPVNPNL | 2178 | P15318.2 |
| | PERTUSSIS | | | |
| 1296 | BORDETELLA | YSAMIHPGRI | 2179 | P15318.2 |
| | PERTUSSIS | | | |
| 1297 | BORDETELLA | YSQTGAHAGI | 2180 | P15318.2 |
| | PERTUSSIS | | | |
| 1298 | CORYNEBACTERIUM | AYNFVESIINLFQVVHNSYN | 2181 | CAE11230.1 |
| | DIPHTHERIAE | | | |
| 1299 | BORDETELLA | SGTTIK | 2182 | BAF35031.1 |
| | PERTUSSIS | | | |
| 1300 | BORDETELLA | RGHTLESAEGRKIFG | 2183 | AAA22974.1 |
| | PERTUSSIS | | | |
| 1301 | BORDETELLA | AGAMTVRDVAAAADLALQAGDA | 2184 | AAA22974.1 |
| | PERTUSSIS | | | |
| 1302 | BORDETELLA | AGAMTVRDVAAAADLALQAGDAL | 2185 | AAA22974.1 |
| | PERTUSSIS | | | |
| 1303 | BORDETELLA | ALAAVLVNPHIFTRIGAAQTSLADGAAGPA | 2186 | AAA22974.1 |
| | PERTUSSIS | | | |
| 1304 | BORDETELLA | ALSIDSMTALGA | 2187 | AAA22974.1 |
| | PERTUSSIS | | | |
| 1305 | BORDETELLA | DLSAARGADISGEGR | 2188 | AAA22974.1 |
| | PERTUSSIS | | | |
| 1306 | BORDETELLA | DQNRYEYIWGLY | 2189 | AAA22974.1 |
| | PERTUSSIS | | | |
| 1307 | BORDETELLA | DYTVSADAIALA | 2190 | AAA22974.1 |
| | PERTUSSIS | | | |
| 1308 | BORDETELLA | GPIVVEAGELVSHAGG | 2191 | AAA22974.1 |
| | PERTUSSIS | | | |
| 1309 | BORDETELLA | GRPEGLKIGAHSATSVSGSFDAL | 2192 | AAA22974.1 |
| | PERTUSSIS | | | |
| 1310 | BORDETELLA | ITVTSRGGFDNEGKMESNK | 2193 | AAA22974.1 |
| | PERTUSSIS | | | |
| 1311 | BORDETELLA | LDQNRYEYIWGLYP | 2194 | AAA22974.1 |
| | PERTUSSIS | | | |
| 1312 | BORDETELLA | LSAARGADISG | 2195 | AAA22974.1 |
| | PERTUSSIS | | | |
| 1313 | BORDETELLA | NKIRLMGPLQ | 2196 | AAA22974.1 |
| | PERTUSSIS | | | |
| 1314 | BORDETELLA | NKLGRIRAGEDM | 2197 | AAA22974.1 |
| | PERTUSSIS | | | |
| 1315 | BORDETELLA | NKLGRIRAGEDMHLDAPRIE | 2198 | AAA22974.1 |
| | PERTUSSIS | | | |
| 1316 | BORDETELLA | PHLRNTGQVVAG | 2199 | AAA22974.1 |
| | PERTUSSIS | | | |
| 1317 | BORDETELLA | QVDLHDLSAARGADISG | 2200 | AAA22974.1 |
| | PERTUSSIS | | | |
| 1318 | BORDETELLA | RDVAAAADLALQ | 2201 | AAA22974.1 |
| | PERTUSSIS | | | |
| 1319 | BORDETELLA | SAARGADISGEG | 2202 | AAA22974.1 |
| | PERTUSSIS | | | |
| 1320 | BORDETELLA | TKGEMQIAGKGGGSP | 2203 | AAA22974.1 |
| | PERTUSSIS | | | |
| 1321 | BORDETELLA | TVSADAIALAAQ | 2204 | AAA22974.1 |
| | PERTUSSIS | | | |
| 1322 | BORDETELLA | VVAGHDIHI | 2205 | AAA22974.1 |
| | PERTUSSIS | | | |
| 1323 | BORDETELLA | PSGPNHTKVVQLPKISKNALKANG | 2206 | CAD12823.1 |
| | PERTUSSIS | | | |
| 1324 | RUBELLA VIRUS | LVGATPERPRLRLVDADDPLLRTAPGPGEV | 2207 | BAA 19902.1 |
| | | WVTPVIGSQAR | | |
| 1325 | RUBELLA VIRUS | QQSRWGLGSPNCHGPDWASPVCQRHSP | 2208 | BAA 19902.1 |
| 1326 | BORDETELLA | AGEAMVLVYYESIAYSF | 2209 | ACI04548.1 |
| | PERTUSSIS | | | |
| 1327 | BORDETELLA | GGVGLASTLWYAESNALSKRLGEL | 2210 | AAZ74322.1 |
| | PERTUSSIS | | | |
| 1328 | BORDETELLA | GTLVRIAPVIGACMARQA | 2211 | ACI04548.1 |
| | PERTUSSIS | | | |
| 1329 | BORDETELLA | IRRVTRVYHNGITGETTT | 2212 | ACI04548.1 |
| | PERTUSSIS | | | |
| 1330 | BORDETELLA | IVKTGERQHGIHIQGSDP | 2213 | AAZ74322.1 |
| | PERTUSSIS | | | |
| 1331 | BORDETELLA | IVKTGERQHGIHIQGSDPGGVRTA | 2214 | AAZ74338.1 |
| | PERTUSSIS | | | |
| 1332 | BORDETELLA | LRDTNVTAVPASGAPAAVSVLGAS | 2215 | AAZ74338.1 |
| | PERTUSSIS | | | |
| 1333 | BORDETELLA | PEAPAPQPPAGRELSAAANAAVNT | 2216 | AAZ74322.1 |
| | PERTUSSIS | | | |
| 1334 | BORDETELLA | AAADFAHAE | 2217 | WP_019247158.1 |
| | PERTUSSIS | | | |
| 1335 | BORDETELLA | AAAEVAGAL | 2218 | WP_019249248.1 |
| | PERTUSSIS | | | |
| 1336 | BORDETELLA | AAESTFESY | 2219 | WP_019247158.1 |
| | PERTUSSIS | | | |
| 1337 | BORDETELLA | AAGFDPEVQ | 2220 | WP_019248145.1 |
| | PERTUSSIS | | | |
| 1338 | BORDETELLA | AALGRGHSL | 2221 | AGS56996.1 |
| | PERTUSSIS | | | |
| 1339 | BORDETELLA | AAMQGAVVH | 2222 | AGT50936.1 |
| | PERTUSSIS | | | |
| 1340 | BORDETELLA | AAPAAHADW | 2223 | AGS56996.1 |
| | PERTUSSIS | | | |
| 1341 | BORDETELLA | AAQATVVQR | 2224 | WP_019247158.1 |
| | PERTUSSIS | | | |
| 1342 | BORDETELLA | AARVAGDNY | 2225 | WP_019249248.1 |
| | PERTUSSIS | | | |
| 1343 | BORDETELLA | AAVALLNKL | 2226 | WP_019249248.1 |
| | PERTUSSIS | | | |
| 1344 | BORDETELLA | ADDPPATVY | 2227 | AAW72734.1 |
| | PERTUSSIS | | | |
| 1345 | BORDETELLA | AEAGRFKVL | 2228 | AGS56996.1 |
| | PERTUSSIS | | | |
| 1346 | BORDETELLA | AEATQLVTA | 2229 | WP_019247158.1 |
| | PERTUSSIS | | | |
| 1347 | BORDETELLA | AEGGATLGA | 2230 | WP_019249248.1 |
| | PERTUSSIS | | | |
| 1348 | BORDETELLA | AEHGEVSIQ | 2231 | WP_019249248.1 |
| | PERTUSSIS | | | |
| 1349 | BORDETELLA | AEIAFYPKE | 2232 | WP_019249248.1 |
| | PERTUSSIS | | | |
| 1350 | BORDETELLA | AEKVTTPAV | 2233 | WP_019247158.1 |
| | PERTUSSIS | | | |
| 1351 | BORDETELLA | AELQTYLRQ | 2234 | 1BCP_C |
| | PERTUSSIS | | | |
| 1352 | BORDETELLA | AEQSLIEVG | 2235 | WP_019249248.1 |
| | PERTUSSIS | | | |
| 1353 | BORDETELLA | AESNALSKR | 2236 | AGS56996.1 |
| | PERTUSSIS | | | |
| 1354 | BORDETELLA | AESSEAMAA | 2237 | AFK26302.1 |
| | PERTUSSIS | | | |
| 1355 | BORDETELLA | AEVKVGYRA | 2238 | WP_019247158.1 |
| | PERTUSSIS | | | |
| 1356 | BORDETELLA | AEVTDTSPS | 2239 | WP_019249248.1 |
| | PERTUSSIS | | | |
| 1357 | BORDETELLA | AGKSLKKKN | 2240 | WP_019247158.1 |
| | PERTUSSIS | | | |
| 1358 | BORDETELLA | AGLAGPSAV | 2241 | WP_019249248.1 |
| | PERTUSSIS | | | |
| 1359 | BORDETELLA | AIRVGRGAR | 2242 | AGT50936.1 |
| | PERTUSSIS | | | |
| 1360 | BORDETELLA | ALAAIASAA | 2243 | WP_019248145.1 |
| | PERTUSSIS | | | |
| 1361 | BORDETELLA | ALADVPYVL | 2244 | AAA22983.1 |
| | PERTUSSIS | | | |
| 1362 | BORDETELLA | ALANDGTIV | 2245 | WP_019248658.1 |
| | PERTUSSIS | | | |
| 1363 | BORDETELLA | ALGRGHSLY | 2246 | AGS56996.1 |
| | PERTUSSIS | | | |
| 1364 | BORDETELLA | ALILAASPV | 2247 | WP_019248658.1 |
| | PERTUSSIS | | | |
| 1365 | BORDETELLA | ALMLACTGL | 2248 | AAA22974.1 |
| | PERTUSSIS | | | |
| 1366 | BORDETELLA | AMQGAVVHL | 2249 | AGT50936.1 |
| | PERTUSSIS | | | |
| 1367 | BORDETELLA | AMTHLSPAL | 2250 | AAA22983.1 |
| | PERTUSSIS | | | |
| 1368 | BORDETELLA | AMYGKHITL | 2251 | WP_019249248.1 |
| | PERTUSSIS | | | |
| 1369 | BORDETELLA | ANEANALLW | 2252 | WP_019249248.1 |
| | PERTUSSIS | | | |
| 1370 | BORDETELLA | APLSITLQA | 2253 | AGT50936.1 |
| | PERTUSSIS | | | |
| 1371 | BORDETELLA | APNALAWAL | 2254 | AAA22974.1 |
| | PERTUSSIS | | | |
| 1372 | BORDETELLA | APPAPKPAP | 2255 | AGS56996.1 |
| | PERTUSSIS | | | |
| 1373 | BORDETELLA | APPGAGFIY | 2256 | 1BCP_C |
| | PERTUSSIS | | | |
| 1374 | BORDETELLA | APQAAPLSI | 2257 | AGT50936.1 |
| | PERTUSSIS | | | |
| 1375 | BORDETELLA | APRIENTAK | 2258 | WP_019249248.1 |
| | PERTUSSIS | | | |
| 1376 | BORDETELLA | AQGKALLYR | 2259 | AGT50936.1 |
| | PERTUSSIS | | | |
| 1377 | BORDETELLA | AQITSYVGF | 2260 | WP_019248658.1 |
| | PERTUSSIS | | | |
| 1378 | BORDETELLA | AQLEVRGQR | 2261 | WP_019249248.1 |
| | PERTUSSIS | | | |
| 1379 | BORDETELLA | AQQLKQADR | 2262 | WP_019247699.1 |
| | PERTUSSIS | | | |
| 1380 | BORDETELLA | AQVTVAGRY | 2263 | WP_019249248.1 |
| | PERTUSSIS | | | |
| 1381 | BORDETELLA | ARRSRVRAL | 2264 | NP_882284.1 |
| | PERTUSSIS | | | |
| 1382 | BORDETELLA | ASPRRARRA | 2265 | WP_019249248.1 |
| | PERTUSSIS | | | |
| 1383 | BORDETELLA | ASSPDAHVP | 2266 | AAA22983.1 |
| | PERTUSSIS | | | |
| 1384 | BORDETELLA | ASVSNPGTF | 2267 | WP_019249248.1 |
| | PERTUSSIS | | | |
| 1385 | BORDETELLA | ATWNFQSTY | 2268 | WP_019249248.1 |
| | PERTUSSIS | | | |
| 1386 | BORDETELLA | ATYIADSGF | 2269 | AGS56996.1 |
| | PERTUSSIS | | | |
| 1387 | BORDETELLA | AVAAPAVGA | 2270 | WP_019249248.1 |
| | PERTUSSIS | | | |
| 1388 | BORDETELLA | AVFMQQRPL | 2271 | AAA22983.1 |
| | PERTUSSIS | | | |
| 1389 | BORDETELLA | AVLVNPHIF | 2272 | WP_019249248.1 |
| | PERTUSSIS | | | |
| 1390 | BORDETELLA | CFGKDLKRP | 2273 | AAA22983.1 |
| | PERTUSSIS | | | |
| 1391 | BORDETELLA | CPSSLGNGV | 2274 | WP_019248145.1 |
| | PERTUSSIS | | | |
| 1392 | BORDETELLA | DAGHEHDTW | 2275 | AAA22984.1 |
| | PERTUSSIS | | | |
| 1393 | BORDETELLA | DAKHDLTVT | 2276 | WP_019249248.1 |
| | PERTUSSIS | | | |
| 1394 | BORDETELLA | DASGQHRLW | 2277 | AGS56996.1 |
| | PERTUSSIS | | | |
| 1395 | BORDETELLA | DATFETYAL | 2278 | YP_006628018.1 |
| | PERTUSSIS | | | |
| 1396 | BORDETELLA | DATFQTYAL | 2279 | 1BCP_C |
| | PERTUSSIS | | | |
| 1397 | BORDETELLA | DATLVGAKF | 2280 | WP_019247158.1 |
| | PERTUSSIS | | | |
| 1398 | BORDETELLA | DDEVDVSGR | 2281 | AAA22974.1 |
| | PERTUSSIS | | | |
| 1399 | BORDETELLA | DENGKPQTY | 2282 | WP_019247158.1 |
| | PERTUSSIS | | | |
| 1400 | BORDETELLA | DGPPSRPTT | 2283 | WP_019247158.1 |
| | PERTUSSIS | | | |
| 1401 | BORDETELLA | DHLTGRSCQ | 2284 | AAW72734.1 |
| | PERTUSSIS | | | |
| 1402 | BORDETELLA | DNEGKMESN | 2285 | WP_019249248.1 |
| | PERTUSSIS | | | |
| 1403 | BORDETELLA | DPPATVYRY | 2286 | AAW72734.1 |
| | PERTUSSIS | | | |
| 1404 | BORDETELLA | EATEGDATL | 2287 | WP_019247158.1 |
| | PERTUSSIS | | | |
| 1405 | BORDETELLA | EATQQAAGF | 2288 | WP_019248145.1 |
| | PERTUSSIS | | | |
| 1406 | BORDETELLA | ECSGKQDCP | 2289 | AAA22983.1 |
| | PERTUSSIS | | | |
| 1407 | BORDETELLA | EGGKLRGKD | 2290 | AAA22974.1 |
| | PERTUSSIS | | | |
| 1408 | BORDETELLA | EGKMESNKD | 2291 | WP_019249248.1 |
| | PERTUSSIS | | | |
| 1409 | BORDETELLA | EHRMQEAVE | 2292 | AAW72734.1 |
| | PERTUSSIS | | | |
| 1410 | BORDETELLA | EKRLDIDDA | 2293 | WP_019249248.1 |
| | PERTUSSIS | | | |
| 1411 | BORDETELLA | EPASANTLL | 2294 | AGS56996.1 |
| | PERTUSSIS | | | |
| 1412 | BORDETELLA | EPQAELAVF | 2295 | AGS56996.1 |
| | PERTUSSIS | | | |
| 1413 | BORDETELLA | EPVKLTLTG | 2296 | AGT50936.1 |
| | PERTUSSIS | | | |
| 1414 | BORDETELLA | ESAEGRKIF | 2297 | WP_019249248.1 |
| | PERTUSSIS | | | |
| 1415 | BORDETELLA | ESYSESHNF | 2298 | WP_019247158.1 |
| | PERTUSSIS | | | |
| 1416 | BORDETELLA | ETFCITTIY | 2299 | 1BCP_C |
| | PERTUSSIS | | | |
| 1417 | BORDETELLA | EVAGALELS | 2300 | WP_019249248.1 |
| | PERTUSSIS | | | |
| 1418 | BORDETELLA | EVAKVEVVP | 2301 | WP_019247158.1 |
| | PERTUSSIS | | | |
| 1419 | BORDETELLA | EVDGIIQEF | 2302 | WP_019249248.1 |
| | PERTUSSIS | | | |
| 1420 | BORDETELLA | EVRADNNFY | 2303 | WP_019248344.1 |
| | PERTUSSIS | | | |
| 1421 | BORDETELLA | FAILSSTTE | 2304 | WP_019247158.1 |
| | PERTUSSIS | | | |
| 1422 | BORDETELLA | FAISAYALK | 2305 | AAA22984.1 |
| | PERTUSSIS | | | |
| 1423 | BORDETELLA | FALYDGTYL | 2306 | AFK26303.1 |
| | PERTUSSIS | | | |
| 1424 | BORDETELLA | FDTMLGFAI | 2307 | AAA22984.1 |
| | PERTUSSIS | | | |
| 1425 | BORDETELLA | FEGKPALEL | 2308 | AAA22983.1 |
| | PERTUSSIS | | | |
| 1426 | BORDETELLA | FELGADHAV | 2309 | AGS56996.1 |
| | PERTUSSIS | | | |
| 1427 | BORDETELLA | FEPGITTNY | 2310 | WP_019248658.1 |
| | PERTUSSIS | | | |
| 1428 | BORDETELLA | FETYALTGI | 2311 | YP_006628018.1 |
| | PERTUSSIS | | | |
| 1429 | BORDETELLA | FIYRETFCI | 2312 | 1BCP_C |
| | PERTUSSIS | | | |
| 1430 | BORDETELLA | FPTRTTAPG | 2313 | NP_882284.1 |
| | PERTUSSIS | | | |
| 1431 | BORDETELLA | FQTYALTGI | 2314 | 1BCP_C |
| | PERTUSSIS | | | |
| 1432 | BORDETELLA | FTHADGWFL | 2315 | AGS56996.1 |
| | PERTUSSIS | | | |
| 1433 | BORDETELLA | FVRDGQSVI | 2316 | 1BCP_C |
| | PERTUSSIS | | | |
| 1434 | BORDETELLA | FVRSGQPVI | 2317 | YP_006628018.1 |
| | PERTUSSIS | | | |
| 1435 | BORDETELLA | FVWYVDTVI | 2318 | WP_019248866.1 |
| | PERTUSSIS | | | |
| 1436 | BORDETELLA | GAASSRQAL | 2319 | WP_019249248.1 |
| | PERTUSSIS | | | |
| 1437 | BORDETELLA | GAASSYFEY | 2320 | AAW72734.1 |
| | PERTUSSIS | | | |
| 1438 | BORDETELLA | GAFDLKTTF | 2321 | AFK26303.1 |
| | PERTUSSIS | | | |
| 1439 | BORDETELLA | GAPAAVSVL | 2322 | AGS56996.1 |
| | PERTUSSIS | | | |
| 1440 | BORDETELLA | GATRAVDSL | 2323 | AGS56996.1 |
| | PERTUSSIS | | | |
| 1441 | BORDETELLA | GAVPGGAVP | 2324 | AGT50936.1 |
| | PERTUSSIS | | | |
| 1442 | BORDETELLA | GEAMVLVYY | 2325 | AFK26302.1 |
| | PERTUSSIS | | | |
| 1443 | BORDETELLA | GEIALGDAT | 2326 | WP_019249248.1 |
| | PERTUSSIS | | | |
| 1444 | BORDETELLA | GELMAAQVA | 2327 | WP_019247158.1 |
| | PERTUSSIS | | | |
| 1445 | BORDETELLA | GGVPGGAVP | 2328 | AAZ74338.1 |
| | PERTUSSIS | | | |
| 1446 | BORDETELLA | GHEHDTWFD | 2329 | AAA22984.1 |
| | PERTUSSIS | | | |
| 1447 | BORDETELLA | GIGALKAGA | 2330 | WP_019249248.1 |
| | PERTUSSIS | | | |
| 1448 | BORDETELLA | GIVIPPKAL | 2331 | 1BCP_C |
| | PERTUSSIS | | | |
| 1449 | BORDETELLA | GKDLKRPGS | 2332 | AAA22983.1 |
| | PERTUSSIS | | | |
| 1450 | BORDETELLA | GKLPKPVTV | 2333 | WP_019247158.1 |
| | PERTUSSIS | | | |
| 1451 | BORDETELLA | GKSLKKKNQ | 2334 | WP_019247158.1 |
| | PERTUSSIS | | | |
| 1452 | BORDETELLA | GLDVQQGTV | 2335 | WP_019249248.1 |
| | PERTUSSIS | | | |
| 1453 | BORDETELLA | GLTDGVSRI | 2336 | WP_019249248.1 |
| | PERTUSSIS | | | |
| 1454 | BORDETELLA | GLYPTYTEW | 2337 | WP_019249248.1 |
| | PERTUSSIS | | | |
| 1455 | BORDETELLA | GLYQTYTEW | 2338 | YP_006626470.1 |
| | PERTUSSIS | | | |
| 1456 | BORDETELLA | GPPSRPTTP | 2339 | WP_019247158.1 |
| | PERTUSSIS | | | |
| 1457 | BORDETELLA | GPSAVAAPA | 2340 | WP_019249248.1 |
| | PERTUSSIS | | | |
| 1458 | BORDETELLA | GVAPTAQQL | 2341 | WP_019248866.1 |
| | PERTUSSIS | | | |
| 1459 | BORDETELLA | GVGLASTLW | 2342 | AGS56996.1 |
| | PERTUSSIS | | | |
| 1460 | BORDETELLA | GYEAGFSLG | 2343 | WP_019247158.1 |
| | PERTUSSIS | | | |
| 1461 | BORDETELLA | HADDGTIVI | 2344 | WP_019248145.1 |
| | PERTUSSIS | | | |
| 1462 | BORDETELLA | HADWNNQSI | 2345 | AGS56996.1 |
| | PERTUSSIS | | | |
| 1463 | BORDETELLA | HAEHEKDVR | 2346 | WP_019247158.1 |
| | PERTUSSIS | | | |
| 1464 | BORDETELLA | HANHYGTRI | 2347 | WP_019247158.1 |
| | PERTUSSIS | | | |
| 1465 | BORDETELLA | HAQGKALLY | 2348 | AGT50936.1 |
| | PERTUSSIS | | | |
| 1466 | BORDETELLA | HFIGYIYEV | 2349 | AAW72734.1 |
| | PERTUSSIS | | | |
| 1467 | BORDETELLA | HLSPALADV | 2350 | AAA22983.1 |
| | PERTUSSIS | | | |
| 1468 | BORDETELLA | HSLYASYEY | 2351 | AGS56996.1 |
| | PERTUSSIS | | | |
| 1469 | BORDETELLA | HVRGMLVPV | 2352 | AAA22974.1 |
| | PERTUSSIS | | | |
| 1470 | BORDETELLA | HVSKEEQYY | 2353 | YP_006628018.1 |
| | PERTUSSIS | | | |
| 1471 | BORDETELLA | HVTRGWSIF | 2354 | AFK26303.1 |
| | PERTUSSIS | | | |
| 1472 | BORDETELLA | IADSGFYLD | 2355 | AGS56996.1 |
| | PERTUSSIS | | | |
| 1473 | BORDETELLA | IAHRTELRG | 2356 | AGS56996.1 |
| | PERTUSSIS | | | |
| 1474 | BORDETELLA | IENTAKLSG | 2357 | WP_019249248.1 |
| | PERTUSSIS | | | |
| 1475 | BORDETELLA | IESKISQSV | 2358 | WP_019249248.1 |
| | PERTUSSIS | | | |
| 1476 | BORDETELLA | IETGGARRF | 2359 | AGT50936.1 |
| | PERTUSSIS | | | |
| 1477 | BORDETELLA | IIKDAPPGA | 2360 | 1BCP_C |
| | PERTUSSIS | | | |
| 1478 | BORDETELLA | IIQEFAADL | 2361 | WP_019249248.1 |
| | PERTUSSIS | | | |
| 1479 | BORDETELLA | ILAGALATY | 2362 | AAW72734.1 |
| | PERTUSSIS | | | |
| 1480 | BORDETELLA | ILLENPAAE | 2363 | AGS56996.1 |
| | PERTUSSIS | | | |
| 1481 | BORDETELLA | ILPILVLAL | 2364 | NP_882286.1 |
| | PERTUSSIS | | | |
| 1482 | BORDETELLA | IPFQRALRL | 2365 | WP_019248145.1 |
| | PERTUSSIS | | | |
| 1483 | BORDETELLA | ISVRVHVSK | 2366 | YP_006628018.1 |
| | PERTUSSIS | | | |
| 1484 | BORDETELLA | ITNETGKTY | 2367 | WP_019247158.1 |
| | PERTUSSIS | | | |
| 1485 | BORDETELLA | ITNKRAALI | 2368 | WP_019249248.1 |
| | PERTUSSIS | | | |
| 1486 | BORDETELLA | ITSYVGFSV | 2369 | WP_019248658.1 |
| | PERTUSSIS | | | |
| 1487 | BORDETELLA | ITVTSRGGF | 2370 | WP_019249248.1 |
| | PERTUSSIS | | | |
| 1488 | BORDETELLA | IVIPPKALF | 2371 | 1BCP_C |
| | PERTUSSIS | | | |
| 1489 | BORDETELLA | IVVEAGELV | 2372 | WP_019249248.1 |
| | PERTUSSIS | | | |
| 1490 | BORDETELLA | KAAKSVNLM | 2373 | WP_019247158.1 |
| | PERTUSSIS | | | |
| 1491 | BORDETELLA | KAAPLRRTT | 2374 | AGS56996.1 |
| | PERTUSSIS | | | |
| 1492 | BORDETELLA | KAGKLSATG | 2375 | WP_019249248.1 |
| | PERTUSSIS | | | |
| 1493 | BORDETELLA | KAGTIAAPW | 2376 | WP_019249248.1 |
| | PERTUSSIS | | | |
| 1494 | BORDETELLA | KAKSLTTEI | 2377 | WP_019249248.1 |
| | PERTUSSIS | | | |
| 1495 | BORDETELLA | KATVTTVQV | 2378 | WP_019247158.1 |
| | PERTUSSIS | | | |
| 1496 | BORDETELLA | KDYRDKDGG | 2379 | WP_019247158.1 |
| | PERTUSSIS | | | |
| 1497 | BORDETELLA | KEAATIVAA | 2380 | WP_019249248.1 |
| | PERTUSSIS | | | |
| 1498 | BORDETELLA | KEDVDAAQI | 2381 | WP_019248658.1 |
| | PERTUSSIS | | | |
| 1499 | BORDETELLA | KEVDGIIQE | 2382 | WP_019249248.1 |
| | PERTUSSIS | | | |
| 1500 | BORDETELLA | KGPKLAMPW | 2383 | AGS56996.1 |
| | PERTUSSIS | | | |
| 1501 | BORDETELLA | KLASGGGAV | 2384 | WP_019249248.1 |
| | PERTUSSIS | | | |
| 1502 | BORDETELLA | KLKGKNQEF | 2385 | AAA22984.1 |
| | PERTUSSIS | | | |
| 1503 | BORDETELLA | KLLHHILPI | 2386 | NP_882286.1 |
| | PERTUSSIS | | | |
| 1504 | BORDETELLA | KPAPQPGPQ | 2387 | AGS56996.1 |
| | PERTUSSIS | | | |
| 1505 | BORDETELLA | KPAPTAPPM | 2388 | WP_019249248.1 |
| | PERTUSSIS | | | |
| 1506 | BORDETELLA | KPAVSVKVA | 2389 | WP_019249248.1 |
| | PERTUSSIS | | | |
| 1507 | BORDETELLA | KPDRAARVA | 2390 | WP_019249248.1 |
| | PERTUSSIS | | | |
| 1508 | BORDETELLA | KPLADIAVI | 2391 | YP_006626470.1 |
| | PERTUSSIS | | | |
| 1509 | BORDETELLA | KPLADIAVV | 2392 | WP_019249248.1 |
| | PERTUSSIS | | | |
| 1510 | BORDETELLA | KPLPKPLPV | 2393 | WP_019247158.1 |
| | PERTUSSIS | | | |
| 1511 | BORDETELLA | KQADRDFVW | 2394 | WP_019247699.1 |
| | PERTUSSIS | | | |
| 1512 | BORDETELLA | KSLPGGKLP | 2395 | WP_019247158.1 |
| | PERTUSSIS | | | |
| 1513 | BORDETELLA | KSYTLRYLA | 2396 | WP_019248658.1 |
| | PERTUSSIS | | | |
| 1514 | BORDETELLA | KTNMVVTSV | 2397 | AAA22983.1 |
| | PERTUSSIS | | | |
| 1515 | BORDETELLA | KVLAPRLYL | 2398 | AAA22974.1 |
| | PERTUSSIS | | | |
| 1516 | BORDETELLA | KVLSTKTTL | 2399 | WP_019247158.1 |
| | PERTUSSIS | | | |
| 1517 | BORDETELLA | LAAGAGLTL | 2400 | WP_019249248.1 |
| | PERTUSSIS | | | |
| 1518 | BORDETELLA | LAAIASAAH | 2401 | WP_019248145.1 |
| | PERTUSSIS | | | |
| 1519 | BORDETELLA | LAANGNGQW | 2402 | AGS56996.1 |
| | PERTUSSIS | | | |
| 1520 | BORDETELLA | LAAQVTQRG | 2403 | WP_019249248.1 |
| | PERTUSSIS | | | |
| 1521 | BORDETELLA | LAARGDGAL | 2404 | AAA22974.1 |
| | PERTUSSIS | | | |
| 1522 | BORDETELLA | LAAVLVNPH | 2405 | WP_019249248.1 |
| | PERTUSSIS | | | |
| 1523 | BORDETELLA | LAGSGLFRM | 2406 | AGS56996.1 |
| | PERTUSSIS | | | |
| 1524 | BORDETELLA | LAKALSAAL | 2407 | WP_019249248.1 |
| | PERTUSSIS | | | |
| 1525 | BORDETELLA | LALQAGDAL | 2408 | WP_019249248.1 |
| | PERTUSSIS | | | |
| 1526 | BORDETELLA | LAMPWTFHA | 2409 | AGS56996.1 |
| | PERTUSSIS | | | |
| 1527 | BORDETELLA | LANDGTIVI | 2410 | WP_019248658.1 |
| | PERTUSSIS | | | |
| 1528 | BORDETELLA | LAPTVGVAF | 2411 | WP_019247158.1 |
| | PERTUSSIS | | | |
| 1529 | BORDETELLA | LASDGSVDF | 2412 | AGS56996.1 |
| | PERTUSSIS | | | |
| 1530 | BORDETELLA | LATYQSEYL | 2413 | AAW72734.1 |
| | PERTUSSIS | | | |
| 1531 | BORDETELLA | LAWALMLAC | 2414 | AAA22974.1 |
| | PERTUSSIS | | | |
| 1532 | BORDETELLA | LEAGRRFTH | 2415 | AGS56996.1 |
| | PERTUSSIS | | | |
| 1533 | BORDETELLA | LFTQQGGAY | 2416 | 1BCP_C |
| | PERTUSSIS | | | |
| 1534 | BORDETELLA | LKRPGSSPM | 2417 | AAA22983.1 |
| | PERTUSSIS | | | |
| 1535 | BORDETELLA | LLGSHVARA | 2418 | AFK26303.1 |
| | PERTUSSIS | | | |
| 1536 | BORDETELLA | LLHHILPIL | 2419 | NP_882286.1 |
| | PERTUSSIS | | | |
| 1537 | BORDETELLA | LLNAGGTLL | 2420 | WP_019249248.1 |
| | PERTUSSIS | | | |
| 1538 | BORDETELLA | LMGPLQVNA | 2421 | WP_019249248.1 |
| | PERTUSSIS | | | |
| 1539 | BORDETELLA | LNDSKITMG | 2422 | WP_019248145.1 |
| | PERTUSSIS | | | |
| 1540 | BORDETELLA | LPEPVKLTL | 2423 | AGT50936.1 |
| | PERTUSSIS | | | |
| 1541 | BORDETELLA | LPILVLALL | 2424 | NP_882286.1 |
| | PERTUSSIS | | | |
| 1542 | BORDETELLA | LPKISKNAL | 2425 | WP_019248145.1 |
| | PERTUSSIS | | | |
| 1543 | BORDETELLA | LPKPVTVKL | 2426 | WP_019247158.1 |
| | PERTUSSIS | | | |
| 1544 | BORDETELLA | LPLKANPMH | 2427 | NP_882285.1 |
| | PERTUSSIS | | | |
| 1545 | BORDETELLA | LPPRPVVAE | 2428 | WP_019247158.1 |
| | PERTUSSIS | | | |
| 1546 | BORDETELLA | LPSIPGTSI | 2429 | AGS56996.1 |
| | PERTUSSIS | | | |
| 1547 | BORDETELLA | LPTHLYKNF | 2430 | AAA22984.1 |
| | PERTUSSIS | | | |
| 1548 | BORDETELLA | LPVRGVALV | 2431 | WP_019249248.1 |
| | PERTUSSIS | | | |
| 1549 | BORDETELLA | LPVSLTALD | 2432 | WP_019249248.1 |
| | PERTUSSIS | | | |
| 1550 | BORDETELLA | LQGGNKVPV | 2433 | WP_019249248.1 |
| | PERTUSSIS | | | |
| 1551 | BORDETELLA | LSAALGADW | 2434 | WP_019249248.1 |
| | PERTUSSIS | | | |
| 1552 | BORDETELLA | LSDAGHEHD | 2435 | AAA22984.1 |
| | PERTUSSIS | | | |
| 1553 | BORDETELLA | LSGEVQRKG | 2436 | WP_019249248.1 |
| | PERTUSSIS | | | |
| 1554 | BORDETELLA | LSSPSAITV | 2437 | WP_019249248.1 |
| | PERTUSSIS | | | |
| 1555 | BORDETELLA | LTWLAILAV | 2438 | AAW72734.1 |
| | PERTUSSIS | | | |
| 1556 | BORDETELLA | LVFSHVRGM | 2439 | AAA22974.1 |
| | PERTUSSIS | | | |
| 1557 | BORDETELLA | LVSDAGADL | 2440 | WP_019249248.1 |
| | PERTUSSIS | | | |
| 1558 | BORDETELLA | LVYYESIAY | 2441 | AFK26302.1 |
| | PERTUSSIS | | | |
| 1559 | BORDETELLA | MAAESTFES | 2442 | WP_019247158.1 |
| | PERTUSSIS | | | |
| 1560 | BORDETELLA | MAAGHDATL | 2443 | WP_019249248.1 |
| | PERTUSSIS | | | |
| 1561 | BORDETELLA | MAAWSERAG | 2444 | AFK26302.1 |
| | PERTUSSIS | | | |
| 1562 | BORDETELLA | MALGALGAA | 2445 | AGS56996.1 |
| | PERTUSSIS | | | |
| 1563 | BORDETELLA | MAPVMGACM | 2446 | ADA85123.1 |
| | PERTUSSIS | | | |
| 1564 | BORDETELLA | MATKGEMQI | 2447 | WP_019249248.1 |
| | PERTUSSIS | | | |
| 1565 | BORDETELLA | MDAKGGTLL | 2448 | WP_019249248.1 |
| | PERTUSSIS | | | |
| 1566 | BORDETELLA | MESNKDIVI | 2449 | WP_019249248.1 |
| | PERTUSSIS | | | |
| 1567 | BORDETELLA | MEVMLRAVF | 2450 | AAA22983.1 |
| | PERTUSSIS | | | |
| 1568 | BORDETELLA | MEYFKTPLP | 2451 | WP_019249248.1 |
| | PERTUSSIS | | | |
| 1569 | BORDETELLA | MHTIASILL | 2452 | AAA22984.1 |
| | PERTUSSIS | | | |
| 1570 | BORDETELLA | MIYMSGLAV | 2453 | 1BCP_C |
| | PERTUSSIS | | | |
| 1571 | BORDETELLA | MLACTGLPL | 2454 | AAA22974.1 |
| | PERTUSSIS | | | |
| 1572 | BORDETELLA | MPIDRKTLC | 2455 | AFK26303.1 |
| | PERTUSSIS | | | |
| 1573 | BORDETELLA | MPKAPELDL | 2456 | WP_019249248.1 |
| | PERTUSSIS | | | |
| 1574 | BORDETELLA | MQRQAGLPL | 2457 | NP_882285.1 |
| | PERTUSSIS | | | |
| 1575 | BORDETELLA | NALAWALML | 2458 | AAA22974.1 |
| | PERTUSSIS | | | |
| 1576 | BORDETELLA | NITNKRAAL | 2459 | WP_019249248.1 |
| | PERTUSSIS | | | |
| 1577 | BORDETELLA | NLMAAESTF | 2460 | WP_019247158.1 |
| | PERTUSSIS | | | |
| 1578 | BORDETELLA | NNETMSGRQ | 2461 | WP_019249248.1 |
| | PERTUSSIS | | | |
| 1579 | BORDETELLA | NPGSLIAEV | 2462 | WP_019249248.1 |
| | PERTUSSIS | | | |
| 1580 | BORDETELLA | NPMHTIASI | 2463 | NP_882285.1 |
| | PERTUSSIS | | | |
| 1581 | BORDETELLA | NPQTQLSNI | 2464 | WP_019248145.1 |
| | PERTUSSIS | | | |
| 1582 | BORDETELLA | NPYTSRRSV | 2465 | AFK26302.1 |
| | PERTUSSIS | | | |
| 1583 | BORDETELLA | PAPTAPPMP | 2466 | WP_019249248.1 |
| | PERTUSSIS | | | |
| 1584 | BORDETELLA | PASANTLLL | 2467 | AGS56996.1 |
| | PERTUSSIS | | | |
| 1585 | BORDETELLA | PAVALPRPL | 2468 | WP_019249248.1 |
| | PERTUSSIS | | | |
| 1586 | BORDETELLA | PDAHVPFCF | 2469 | AAA22983.1 |
| | PERTUSSIS | | | |
| 1587 | BORDETELLA | PELGAAIRV | 2470 | AGT50936.1 |
| | PERTUSSIS | | | |
| 1588 | BORDETELLA | PFIIKLKDC | 2471 | WP_019248145.1 |
| | PERTUSSIS | | | |
| 1589 | BORDETELLA | PGPQPPQPP | 2472 | AGS56996.1 |
| | PERTUSSIS | | | |
| 1590 | BORDETELLA | PGPQPPQPQ | 2473 | AAZ74338.1 |
| | PERTUSSIS | | | |
| 1591 | BORDETELLA | PGPTTDYST | 2474 | WP_019248145.1 |
| | PERTUSSIS | | | |
| 1592 | BORDETELLA | PGTFTAGKD | 2475 | WP_019249248.1 |
| | PERTUSSIS | | | |
| 1593 | BORDETELLA | PGTPGDLLE | 2476 | AAA22984.1 |
| | PERTUSSIS | | | |
| 1594 | BORDETELLA | PKPKPKAER | 2477 | WP_019247158.1 |
| | PERTUSSIS | | | |
| 1595 | BORDETELLA | PKPKPKPKA | 2478 | WP_019247158.1 |
| | PERTUSSIS | | | |
| 1596 | BORDETELLA | PKPKPKPKP | 2479 | WP_019247158.1 |
| | PERTUSSIS | | | |
| 1597 | BORDETELLA | PLPPRPVVA | 2480 | WP_019247158.1 |
| | PERTUSSIS | | | |
| 1598 | BORDETELLA | PPAPKPAPQ | 2481 | AGS56996.1 |
| | PERTUSSIS | | | |
| 1599 | BORDETELLA | PPKPAPVAK | 2482 | WP_019247158.1 |
| | PERTUSSIS | | | |
| 1600 | BORDETELLA | PPRPVAAQV | 2483 | WP_019247158.1 |
| | PERTUSSIS | | | |
| 1601 | BORDETELLA | PPRPVVAEK | 2484 | WP_019247158.1 |
| | PERTUSSIS | | | |
| 1602 | BORDETELLA | PPSRPTTPP | 2485 | WP_019247158.1 |
| | PERTUSSIS | | | |
| 1603 | BORDETELLA | PRRARRALR | 2486 | WP_019249248.1 |
| | PERTUSSIS | | | |
| 1604 | BORDETELLA | QAAPLSITL | 2487 | AGT50936.1 |
| | PERTUSSIS | | | |
| 1605 | BORDETELLA | QADRDFVWY | 2488 | WP_019247699.1 |
| | PERTUSSIS | | | |
| 1606 | BORDETELLA | QAIVVGKDL | 2489 | WP_019249248.1 |
| | PERTUSSIS | | | |
| 1607 | BORDETELLA | QALGALKLY | 2490 | ACI16088.1 |
| | PERTUSSIS | | | |
| 1608 | BORDETELLA | QELALKLKG | 2491 | AAA22984.1 |
| | PERTUSSIS | | | |
| 1609 | BORDETELLA | QITQHGGPY | 2492 | NP_882283.1 |
| | PERTUSSIS | | | |
| 1610 | BORDETELLA | QITQHGSPY | 2493 | AFK26303.1 |
| | PERTUSSIS | | | |
| 1611 | BORDETELLA | QPLPPRPVA | 2494 | WP_019247158.1 |
| | PERTUSSIS | | | |
| 1612 | BORDETELLA | QPPAGRELS | 2495 | AGS56996.1 |
| | PERTUSSIS | | | |
| 1613 | BORDETELLA | QQLKQADRD | 2496 | WP_019247699.1 |
| | PERTUSSIS | | | |
| 1614 | BORDETELLA | QQVQVLQRQ | 2497 | WP_019247158.1 |
| | PERTUSSIS | | | |
| 1615 | BORDETELLA | QSIVEAPEL | 2498 | AGT50936.1 |
| | PERTUSSIS | | | |
| 1616 | BORDETELLA | QVGSSNSAF | 2499 | AAW72734.1 |
| | PERTUSSIS | | | |
| 1617 | BORDETELLA | RAGLSPATW | 2500 | WP_019249248.1 |
| | PERTUSSIS | | | |
| 1618 | BORDETELLA | RARRALRQD | 2501 | WP_019249248.1 |
| | PERTUSSIS | | | |
| 1619 | BORDETELLA | RASASRARI | 2502 | WP_019249248.1 |
| | PERTUSSIS | | | |
| 1620 | BORDETELLA | RELSAAANA | 2503 | AGS56996.1 |
| | PERTUSSIS | | | |
| 1621 | BORDETELLA | RETFCITTI | 2504 | 1BCP_C |
| | PERTUSSIS | | | |
| 1622 | BORDETELLA | RGFAQRQQL | 2505 | AGS56996.1 |
| | PERTUSSIS | | | |
| 1623 | BORDETELLA | RGSAATFTL | 2506 | WP_019248295.1 |
| | PERTUSSIS | | | |
| 1624 | BORDETELLA | RGWSIFALY | 2507 | AFK26303.1 |
| | PERTUSSIS | | | |
| 1625 | BORDETELLA | RKMLYLIYV | 2508 | YP_006628018.1 |
| | PERTUSSIS | | | |
| 1626 | BORDETELLA | RLRKMLYLI | 2509 | YP_006628018.1 |
| | PERTUSSIS | | | |
| 1627 | BORDETELLA | RPQITDAVT | 2510 | WP_019249248.1 |
| | PERTUSSIS | | | |
| 1628 | BORDETELLA | RPSVNGGRI | 2511 | WP_019249248.1 |
| | PERTUSSIS | | | |
| 1629 | BORDETELLA | RRFTHADGW | 2512 | AGS56996.1 |
| | PERTUSSIS | | | |
| 1630 | BORDETELLA | RSGARATSL | 2513 | AAA22974.1 |
| | PERTUSSIS | | | |
| 1631 | BORDETELLA | RSRVRALAW | 2514 | NP_882284.1 |
| | PERTUSSIS | | | |
| 1632 | BORDETELLA | RSRVRALSW | 2515 | YP_006628019.1 |
| | PERTUSSIS | | | |
| 1633 | BORDETELLA | RTHGVGASL | 2516 | AGS56996.1 |
| | PERTUSSIS | | | |
| 1634 | BORDETELLA | RTRGQARSG | 2517 | AAA22974.1 |
| | PERTUSSIS | | | |
| 1635 | BORDETELLA | RVAPPAVAL | 2518 | WP_019249248.1 |
| | PERTUSSIS | | | |
| 1636 | BORDETELLA | RVLPEPVKL | 2519 | AGT50936.1 |
| | PERTUSSIS | | | |
| 1637 | BORDETELLA | RVRALAWLL | 2520 | NP_882284.1 |
| | PERTUSSIS | | | |
| 1638 | BORDETELLA | RVRALSWLL | 2521 | YP_006628019.1 |
| | PERTUSSIS | | | |
| 1639 | BORDETELLA | RVTVSGGSL | 2522 | AGT50936.1 |
| | PERTUSSIS | | | |
| 1640 | BORDETELLA | SEAMAAWSE | 2523 | AFK26302.1 |
| | PERTUSSIS | | | |
| 1641 | BORDETELLA | SESHNFHAS | 2524 | WP_019247158.1 |
| | PERTUSSIS | | | |
| 1642 | BORDETELLA | SGEGRVNIG | 2525 | WP_019249248.1 |
| | PERTUSSIS | | | |
| 1643 | BORDETELLA | SGLAVRVHV | 2526 | 1BCP_C |
| | PERTUSSIS | | | |
| 1644 | BORDETELLA | SLADISLGA | 2527 | WP_019249248.1 |
| | PERTUSSIS | | | |
| 1645 | BORDETELLA | SLFAILSST | 2528 | WP_019247158.1 |
| | PERTUSSIS | | | |
| 1646 | BORDETELLA | SLFAPHGNV | 2529 | AAZ74338.1 |
| | PERTUSSIS | | | |
| 1647 | BORDETELLA | SLSIDNATW | 2530 | AGS56996.1 |
| | PERTUSSIS | | | |
| 1648 | BORDETELLA | SPMEVMLRA | 2531 | AAA22983.1 |
| | PERTUSSIS | | | |
| 1649 | BORDETELLA | SPQPIRATV | 2532 | WP_019247158.1 |
| | PERTUSSIS | | | |
| 1650 | BORDETELLA | SPRRARRAL | 2533 | WP_019249248.1 |
| | PERTUSSIS | | | |
| 1651 | BORDETELLA | SPSRLAGTL | 2534 | WP_019249248.1 |
| | PERTUSSIS | | | |
| 1652 | BORDETELLA | SSTPLGSLF | 2535 | WP_019247158.1 |
| | PERTUSSIS | | | |
| 1653 | BORDETELLA | STYELLDYL | 2536 | WP_019249248.1 |
| | PERTUSSIS | | | |
| 1654 | BORDETELLA | SVAMKPYEV | 2537 | AAA22983.1 |
| | PERTUSSIS | | | |
| 1655 | BORDETELLA | SVAPNALAW | 2538 | AAA22974.1 |
| | PERTUSSIS | | | |
| 1656 | BORDETELLA | SVKVAKKLF | 2539 | WP_019249248.1 |
| | PERTUSSIS | | | |
| 1657 | BORDETELLA | TAFMSGRSL | 2540 | AAA22984.1 |
| | PERTUSSIS | | | |
| 1658 | BORDETELLA | TAGATPFDI | 2541 | WP_019248658.1 |
| | PERTUSSIS | | | |
| 1659 | BORDETELLA | TAPVTSPAW | 2542 | AAW72734.1 |
| | PERTUSSIS | | | |
| 1660 | BORDETELLA | TARTGWLTW | 2543 | AAW72734.1 |
| | PERTUSSIS | | | |
| 1661 | BORDETELLA | TEAQGVQVR | 2544 | WP_019248145.1 |
| | PERTUSSIS | | | |
| 1662 | BORDETELLA | TEVYLEHRM | 2545 | AAW72734.1 |
| | PERTUSSIS | | | |
| 1663 | BORDETELLA | TFEGKPALE | 2546 | AAA22983.1 |
| | PERTUSSIS | | | |
| 1664 | BORDETELLA | TFTGKVTNG | 2547 | WP_019248658.1 |
| | PERTUSSIS | | | |
| 1665 | BORDETELLA | TGDGGGHTD | 2548 | AGS56996.1 |
| | PERTUSSIS | | | |
| 1666 | BORDETELLA | TLAKALSAA | 2549 | WP_019249248.1 |
| | PERTUSSIS | | | |
| 1667 | BORDETELLA | TLANVGDTW | 2550 | AGS56996.1 |
| | PERTUSSIS | | | |
| 1668 | BORDETELLA | TLNASNLTL | 2551 | WP_019249248.1 |
| | PERTUSSIS | | | |
| 1669 | BORDETELLA | TLSSAHGNV | 2552 | WP_019249248.1 |
| | PERTUSSIS | | | |
| 1670 | BORDETELLA | TPFDIKLKE | 2553 | WP_019248658.1 |
| | PERTUSSIS | | | |
| 1671 | BORDETELLA | TPFIIKLKD | 2554 | WP_019248145.1 |
| | PERTUSSIS | | | |
| 1672 | BORDETELLA | TPGWSIYGL | 2555 | 1BCP_C |
| | PERTUSSIS | | | |
| 1673 | BORDETELLA | TPLGSAATF | 2556 | AGS56996.1 |
| | PERTUSSIS | | | |
| 1674 | BORDETELLA | TPLGSLFAI | 2557 | WP_019247158.1 |
| | PERTUSSIS | | | |
| 1675 | BORDETELLA | TPLPVSLTA | 2558 | WP_019249248.1 |
| | PERTUSSIS | | | |
| 1676 | BORDETELLA | TRQGIMDQY | 2559 | YP_006626873.1 |
| | PERTUSSIS | | | |
| 1677 | BORDETELLA | TSKQDERNY | 2560 | WP_019247158.1 |
| | PERTUSSIS | | | |
| 1678 | BORDETELLA | TSPYDGKYW | 2561 | YP_006628018.1 |
| | PERTUSSIS | | | |
| 1679 | BORDETELLA | TSRRSVASI | 2562 | AFK26302.1 |
| | PERTUSSIS | | | |
| 1680 | BORDETELLA | TSRTVTMRY | 2563 | NP_879898.1 |
| | PERTUSSIS | | | |
| 1681 | BORDETELLA | TTEYPNARY | 2564 | ADA85123.1 |
| | PERTUSSIS | | | |
| 1682 | BORDETELLA | TTEYSNARY | 2565 | AFK26302.1 |
| | PERTUSSIS | | | |
| 1683 | BORDETELLA | TTLGLEQTF | 2566 | WP_019247158.1 |
| | PERTUSSIS | | | |
| 1684 | BORDETELLA | TVLAAGAGL | 2567 | WP_019249248.1 |
| | PERTUSSIS | | | |
| 1685 | BORDETELLA | TVQELALKL | 2568 | AAA22984.1 |
| | PERTUSSIS | | | |
| 1686 | BORDETELLA | TVVQRNKHW | 2569 | WP_019247158.1 |
| | PERTUSSIS | | | |
| 1687 | BORDETELLA | VAAAADLAL | 2570 | WP_019249248.1 |
| | PERTUSSIS | | | |
| 1688 | BORDETELLA | VALASQARW | 2571 | AGS56996.1 |
| | PERTUSSIS | | | |
| 1689 | BORDETELLA | VAMKPYEVT | 2572 | AAA22983.1 |
| | PERTUSSIS | | | |
| 1690 | BORDETELLA | VARLVKLQG | 2573 | WP_019249248.1 |
| | PERTUSSIS | | | |
| 1691 | BORDETELLA | VAVAGGRWH | 2574 | AGS56996.1 |
| | PERTUSSIS | | | |
| 1692 | BORDETELLA | VEASAITTY | 2575 | WP_019248145.1 |
| | PERTUSSIS | | | |
| 1693 | BORDETELLA | VEDIGGKNY | 2576 | WP_019247158.1 |
| | PERTUSSIS | | | |
| 1694 | BORDETELLA | VEVSSPPPV | 2577 | WP_019247158.1 |
| | PERTUSSIS | | | |
| 1695 | BORDETELLA | VGAGGYEAG | 2578 | WP_019247158.1 |
| | PERTUSSIS | | | |
| 1696 | BORDETELLA | VGGGEHGRW | 2579 | WP_019249248.1 |
| | PERTUSSIS | | | |
| 1697 | BORDETELLA | VHVSKEEQY | 2580 | YP_006628018.1 |
| | PERTUSSIS | | | |
| 1698 | BORDETELLA | VIDGQKVLA | 2581 | AAA22974.1 |
| | PERTUSSIS | | | |
| 1699 | BORDETELLA | VIGACTSPY | 2582 | YP_006628018.1 |
| | PERTUSSIS | | | |
| 1700 | BORDETELLA | VKLGGVYEA | 2583 | AAA22974.1 |
| | PERTUSSIS | | | |
| 1701 | BORDETELLA | VLAPRLYLT | 2584 | AAA22974.1 |
| | PERTUSSIS | | | |
| 1702 | BORDETELLA | VLVKTNMVV | 2585 | AAA22983.1 |
| | PERTUSSIS | | | |
| 1703 | BORDETELLA | VPASGAPAA | 2586 | AGS56996.1 |
| | PERTUSSIS | | | |
| 1704 | BORDETELLA | VPFCFGKDL | 2587 | AAA22983.1 |
| | PERTUSSIS | | | |
| 1705 | BORDETELLA | VPVSEHCTV | 2588 | AAA22974.1 |
| | PERTUSSIS | | | |
| 1706 | BORDETELLA | VPVTPPKVE | 2589 | WP_019247158.1 |
| | PERTUSSIS | | | |
| 1707 | BORDETELLA | VRTVSAMEY | 2590 | WP_019249248.1 |
| | PERTUSSIS | | | |
| 1708 | BORDETELLA | VSGGSLSAP | 2591 | AGT50936.1 |
| | PERTUSSIS | | | |
| 1709 | BORDETELLA | VSSATKAKG | 2592 | WP_019248658.1 |
| | PERTUSSIS | | | |
| 1710 | BORDETELLA | VSSPPPVSV | 2593 | WP_019247158.1 |
| | PERTUSSIS | | | |
| 1711 | BORDETELLA | VSVKVAKKL | 2594 | WP_019249248.1 |
| | PERTUSSIS | | | |
| 1712 | BORDETELLA | VTMRYLASY | 2595 | WP_019248145.1 |
| | PERTUSSIS | | | |
| 1713 | BORDETELLA | VTSVAMKPY | 2596 | AAA22983.1 |
| | PERTUSSIS | | | |
| 1714 | BORDETELLA | VVAEKVTTP | 2597 | WP_019247158.1 |
| | PERTUSSIS | | | |
| 1715 | BORDETELLA | VVDGPPSRP | 2598 | WP_019247158.1 |
| | PERTUSSIS | | | |
| 1716 | BORDETELLA | VVETAQPLP | 2599 | WP_019247158.1 |
| | PERTUSSIS | | | |
| 1717 | BORDETELLA | WLTWLAILA | 2600 | AAW72734.1 |
| | PERTUSSIS | | | |
| 1718 | BORDETELLA | WTFHAGYRY | 2601 | AGS56996.1 |
| | PERTUSSIS | | | |
| 1719 | BORDETELLA | WVMTDNSNV | 2602 | AGS56996.1 |
| | PERTUSSIS | | | |
| 1720 | BORDETELLA | YAEHGEVSI | 2603 | WP_019249248.1 |
| | PERTUSSIS | | | |
| 1721 | BORDETELLA | YAIDGTAAG | 2604 | WP_019249248.1 |
| | PERTUSSIS | | | |
| 1722 | BORDETELLA | YALKSRIAL | 2605 | AAA22984.1 |
| | PERTUSSIS | | | |
| 1723 | BORDETELLA | YATNPQTQL | 2606 | WP_019248145.1 |
| | PERTUSSIS | | | |
| 1724 | BORDETELLA | YDTGDLIAY | 2607 | WP_019248658.1 |
| | PERTUSSIS | | | |
| 1725 | BORDETELLA | YEAGFSLGS | 2608 | WP_019247158.1 |
| | PERTUSSIS | | | |
| 1726 | BORDETELLA | YEDATFETY | 2609 | YP_006628018.1 |
| | PERTUSSIS | | | |
| 1727 | BORDETELLA | YENKSSTPL | 2610 | WP_019247158.1 |
| | PERTUSSIS | | | |
| 1728 | BORDETELLA | YEVTPTRML | 2611 | AAA22983.1 |
| | PERTUSSIS | | | |
| 1729 | BORDETELLA | YEYIWGLYP | 2612 | WP_019249248.1 |
| | PERTUSSIS | | | |
| 1730 | BORDETELLA | YEYIWGLYQ | 2613 | YP_006626470.1 |
| | PERTUSSIS | | | |
| 1731 | BORDETELLA | YEYSKGPKL | 2614 | AGS56996.1 |
| | PERTUSSIS | | | |
| 1732 | BORDETELLA | YFEPGPTTD | 2615 | WP_019248145.1 |
| | PERTUSSIS | | | |
| 1733 | BORDETELLA | YIWGLYPTY | 2616 | WP_019249248.1 |
| | PERTUSSIS | | | |
| 1734 | BORDETELLA | YIWGLYQTY | 2617 | YP_006626470.1 |
| | PERTUSSIS | | | |
| 1735 | BORDETELLA | YLRQITPGW | 2618 | 1BCP_C |
| | PERTUSSIS | | | |
| 1736 | BORDETELLA | YMIYMSGLA | 2619 | 1BCP_C |
| | PERTUSSIS | | | |
| 1737 | BORDETELLA | YPALRAALI | 2620 | WP_019248658.1 |
| | PERTUSSIS | | | |
| 1738 | BORDETELLA | YPGTPGDLL | 2621 | AAA22984.1 |
| | PERTUSSIS | | | |
| 1739 | BORDETELLA | YPTYTEWSV | 2622 | WP_019249248.1 |
| | PERTUSSIS | | | |
| 1740 | BORDETELLA | YQTYTEWSV | 2623 | YP_006626470.1 |
| | PERTUSSIS | | | |
| 1741 | BORDETELLA | YSTGDLRAY | 2624 | WP_019248145.1 |
| | PERTUSSIS | | | |
| 1742 | BORDETELLA | YTLRYLASY | 2625 | WP_019248658.1 |
| | PERTUSSIS | | | |
| 1743 | BORDETELLA | YVLVKTNMV | 2626 | AAA22983.1 |
| | PERTUSSIS | | | |
| 1744 | BORDETELLA | YYDYEDATF | 2627 | YP_006628018.1 |
| | PERTUSSIS | | | |
| 1745 | BORDETELLA | AAFIALYPNSQLAPT | 2628 | Q7VU05 |
| | PERTUSSIS 509 | | | |
| 1746 | BORDETELLA | GGAEYNLALGQRRA | 2629 | Q7VU04 |
| | PERTUSSIS 509 | | | |
| 1747 | BORDETELLA | GGAEYNLALGQRRADA | 2630 | Q7VU04 |
| | PERTUSSIS 509 | | | |
| 1748 | BORDETELLA | IALYPNSQLAPT | 2631 | Q7VU05 |
| | PERTUSSIS 509 | | | |
| 1749 | BORDETELLA | KPDQGEVVAVGPGKKTED | 2632 | POA339.1 |
| | PERTUSSIS 509 | | | |
| 1750 | BORDETELLA | KPDQGEVVAVGPGKKTEDG | 2633 | POA339.1 |
| | PERTUSSIS 509 | | | |
| 1751 | BORDETELLA | LAEVLDYHNFVLTQ | 2634 | Q7VWM1.1 |
| | PERTUSSIS 509 | | | |
| 1752 | CORYNEBACTERIUM | QSIALSSLMVAQAIP | 2635 | AAV70486.1 |
| | DIPHTHERIAE | | | |
| 1753 | CORYNEBACTERIUM | SIGVLGYQKTVDHTKVNSKLSLF | 2636 | AAV70486.1 |
| | DIPHTHERIAE | | | |
| 1754 | BORDETELLA | AAHADWNNQSIVKT | 2637 | ABO77783.1 |
| | PERTUSSIS | | | |
| 1755 | BORDETELLA | AALGRG | 2638 | ABO77783.1 |
| | PERTUSSIS | | | |
| 1756 | BORDETELLA | AALGRGHSLYASYE | 2639 | ABO77783.1 |
| | PERTUSSIS | | | |
| 1757 | BORDETELLA | AAPLRRTTLAMALG | 2640 | ABO77783.1 |
| | PERTUSSIS | | | |
| 1758 | BORDETELLA | AAPLSITLQAGAHA | 2641 | ABO77783.1 |
| | PERTUSSIS | | | |
| 1759 | BORDETELLA | ADAQGDIVATELPS | 2642 | ABO77783.1 |
| | PERTUSSIS | | | |
| 1760 | BORDETELLA | ADSGFYLDATLRAS | 2643 | ABO77783.1 |
| | PERTUSSIS | | | |
| 1761 | BORDETELLA | AELA | 2644 | ABO77783.1 |
| | PERTUSSIS | | | |
| 1762 | BORDETELLA | AELAVFRAGGGAYR | 2645 | ABO77783.1 |
| | PERTUSSIS | | | |
| 1763 | BORDETELLA | AELQFRNGSVTSSG | 2646 | ABO77783.1 |
| | PERTUSSIS | | | |
| 1764 | BORDETELLA | AGGRWHLGGLAGYT | 2647 | ABO77783.1 |
| | PERTUSSIS | | | |
| 1765 | BORDETELLA | AGVAAMQGAVVHLQ | 2648 | ABO77783.1 |
| | PERTUSSIS | | | |
| 1766 | BORDETELLA | AGYTRGDRGFTGDG | 2649 | ABO77783.1 |
| | PERTUSSIS | | | |
| 1767 | BORDETELLA | ALASQARWTGATRA | 2650 | ABO77783.1 |
| | PERTUSSIS | | | |
| 1768 | BORDETELLA | AMPWTFHAGYRYSW | 2651 | ABO77783.1 |
| | PERTUSSIS | | | |
| 1769 | BORDETELLA | AMQGAVVHLQRATIRRGDAP | 2652 | ABO77783.1 |
| | PERTUSSIS | | | |
| 1770 | BORDETELLA | ANGLRVRDE | 2653 | ABO77783.1 |
| | PERTUSSIS | | | |
| 1771 | BORDETELLA | ANGLRVRDEGGSSV | 2654 | ABO77783.1 |
| | PERTUSSIS | | | |
| 1772 | BORDETELLA | ANKDGKVDIGTYRY | 2655 | ABO77783.1 |
| | PERTUSSIS | | | |
| 1773 | BORDETELLA | APAAVSVLGASELT | 2656 | ABO77783.1 |
| | PERTUSSIS | | | |
| 1774 | BORDETELLA | APPAPKPAPQPGPQ | 2657 | ABO77783.1 |
| | PERTUSSIS | | | |
| 1775 | BORDETELLA | AQGILLENPAAELQ | 2658 | ABO77783.1 |
| | PERTUSSIS | | | |
| 1776 | BORDETELLA | ARWTGATRAVDSLS | 2659 | ABO77783.1 |
| | PERTUSSIS | | | |
| 1777 | BORDETELLA | ASLEAGRRFTHADG | 2660 | ABO77783.1 |
| | PERTUSSIS | | | |
| 1778 | BORDETELLA | ASYEYSKGPKLAMP | 2661 | ABO77783.1 |
| | PERTUSSIS | | | |
| 1779 | BORDETELLA | ATFTLANKD | 2662 | ABO77783.1 |
| | PERTUSSIS | | | |
| 1780 | BORDETELLA | ATFTLANKDGKVDI | 2663 | ABO77783.1 |
| | PERTUSSIS | | | |
| 1781 | BORDETELLA | ATRAVDSLSIDNAT | 2664 | ABO77783.1 |
| | PERTUSSIS | | | |
| 1782 | BORDETELLA | DDDGIALYVAGEQAQ | 2665 | ABO77783.1 |
| | PERTUSSIS | | | |
| 1783 | BORDETELLA | DDGIALYVAGEQAQ | 2666 | ABO77783.1 |
| | PERTUSSIS | | | |
| 1784 | BORDETELLA | DGGHITGGRAAGVA | 2667 | ABO77783.1 |
| | PERTUSSIS | | | |
| 1785 | BORDETELLA | DGIRRFLGTVTVKAGK | 2668 | ABO77783.1 |
| | PERTUSSIS | | | |
| 1786 | BORDETELLA | DGSVDFQQPAEAGR | 2669 | ABO77783.1 |
| | PERTUSSIS | | | |
| 1787 | BORDETELLA | DGYAVKGKYRTHGV | 2670 | ABO77783.1 |
| | PERTUSSIS | | | |
| 1788 | BORDETELLA | DIVATELPSIPGTS | 2671 | ABO77783.1 |
| | PERTUSSIS | | | |
| 1789 | BORDETELLA | DKLVVMQDASGQHR | 2672 | ABO77783.1 |
| | PERTUSSIS | | | |
| 1790 | BORDETELLA | DLGLSDKLVVMQDA | 2673 | ABO77783.1 |
| | PERTUSSIS | | | |
| 1791 | BORDETELLA | DNATWVMTDNSNVGA | 2674 | ABO77783.1 |
| | PERTUSSIS | | | |
| 1792 | BORDETELLA | DNATWVMTDNSNVGALRLA | 2675 | ABO77783.1 |
| | PERTUSSIS | | | |
| 1793 | BORDETELLA | DNRAGRRFDQKVAG | 2676 | ABO77783.1 |
| | PERTUSSIS | | | |
| 1794 | BORDETELLA | EAGRFKVLTVNTLA | 2677 | ABO77783.1 |
| | PERTUSSIS | | | |
| 1795 | BORDETELLA | ELAQSIVEAPELGA | 2678 | ABO77783.1 |
| | PERTUSSIS | | | |
| 1796 | BORDETELLA | ELGAAIRVGRGARV | 2679 | ABO77783.1 |
| | PERTUSSIS | | | |
| 1797 | BORDETELLA | ELGADHAVAVAGGR | 2680 | ABO77783.1 |
| | PERTUSSIS | | | |
| 1798 | BORDETELLA | ELPSIPGTSIGPLD | 2681 | ABO77783.1 |
| | PERTUSSIS | | | |
| 1799 | BORDETELLA | EPVKLTLTGGADAQ | 2682 | ABO77783.1 |
| | PERTUSSIS | | | |
| 1800 | BORDETELLA | EQAQASIADSTLQG | 2683 | ABO77783.1 |
| | PERTUSSIS | | | |
| 1801 | BORDETELLA | ERGANVTVQRSAIV | 2684 | ABO77783.1 |
| | PERTUSSIS | | | |
| 1802 | BORDETELLA | ERQHGIHIQGSDPG | 2685 | ABO77783.1 |
| | PERTUSSIS | | | |
| 1803 | BORDETELLA | EVGKRIELAGGRQV | 2686 | ABO77783.1 |
| | PERTUSSIS | | | |
| 1804 | BORDETELLA | FDGAGTVHTNGIAH | 2687 | ABO77783.1 |
| | PERTUSSIS | | | |
| 1805 | BORDETELLA | FQQPAEAGRFKVLT | 2688 | ABO77783.1 |
| | PERTUSSIS | | | |
| 1806 | BORDETELLA | FRAGGGAYRAANGL | 2689 | ABO77783.1 |
| | PERTUSSIS | | | |
| 1807 | BORDETELLA | GAHAQGKALLYRVL | 2690 | ABO77783.1 |
| | PERTUSSIS | | | |
| 1808 | BORDETELLA | GARVTVSGGSLSAP | 2691 | ABO77783.1 |
| | PERTUSSIS | | | |
| 1809 | BORDETELLA | GAYRAANGLRVRDE | 2692 | ABO77783.1 |
| | PERTUSSIS | | | |
| 1810 | BORDETELLA | GDAPAGGAVPGGAV | 2693 | ABO77783.1 |
| | PERTUSSIS | | | |
| 1811 | BORDETELLA | GGAVPGGAVPGGFG | 2694 | ABO77783.1 |
| | PERTUSSIS | | | |
| 1812 | BORDETELLA | GGAVPGGFGPVLDG | 2695 | ABO77783.1 |
| | PERTUSSIS | | | |
| 1813 | BORDETELLA | GGFGPVLDGWYGVD | 2696 | ABO77783.1 |
| | PERTUSSIS | | | |
| 1814 | BORDETELLA | GGLHIGALQSLQPE | 2697 | ABO77783.1 |
| | PERTUSSIS | | | |
| 1815 | BORDETELLA | GGVQIERGANVTVQ | 2698 | ABO77783.1 |
| | PERTUSSIS | | | |
| 1816 | BORDETELLA | GHSLYASYEYSKGP | 2699 | ABO77783.1 |
| | PERTUSSIS | | | |
| 1817 | BORDETELLA | GHTDSVHVGGYATY | 2700 | ABO77783.1 |
| | PERTUSSIS | | | |
| 1818 | BORDETELLA | GIAHRTELRGTRAE | 2701 | ABO77783.1 |
| | PERTUSSIS | | | |
| 1819 | BORDETELLA | GKALLYRVLPEPVK | 2702 | ABO77783.1 |
| | PERTUSSIS | | | |
| 1820 | BORDETELLA | GLGMAAALGRGHSL | 2703 | ABO77783.1 |
| | PERTUSSIS | | | |
| 1821 | BORDETELLA | GNVIETGGARRFAP | 2704 | ABO77783.1 |
| | PERTUSSIS | | | |
| 1822 | BORDETELLA | GPLDVALASQARWT | 2705 | ABO77783.1 |
| | PERTUSSIS | | | |
| 1823 | BORDETELLA | GQHRLWVRN | 2706 | ABO77783.1 |
| | PERTUSSIS | | | |
| 1824 | BORDETELLA | GRGFAQRQQLDNRA | 2707 | ABO77783.1 |
| | PERTUSSIS | | | |
| 1825 | BORDETELLA | GRLGLEVGKRIELA | 2708 | ABO77783.1 |
| | PERTUSSIS | | | |
| 1826 | BORDETELLA | GRQVQPYIKASVLQ | 2709 | ABO77783.1 |
| | PERTUSSIS | | | |
| 1827 | BORDETELLA | GRRFTHADGWFLEPQAELA | 2710 | ABO77783.1 |
| | PERTUSSIS | | | |
| 1828 | BORDETELLA | GSEPASANTLLLVQ | 2711 | ABO77783.1 |
| | PERTUSSIS | | | |
| 1829 | BORDETELLA | GSSVLGRLGLEVGK | 2712 | ABO77783.1 |
| | PERTUSSIS | | | |
| 1830 | BORDETELLA | GTTIKVSGRQAQGI | 2713 | ABO77783.1 |
| | PERTUSSIS | | | |
| 1831 | BORDETELLA | GTVTVKAGKLVADH | 2714 | ABO77783.1 |
| | PERTUSSIS | | | |
| 1832 | BORDETELLA | HAVAVAGGRWHLGG | 2715 | ABO77783.1 |
| | PERTUSSIS | | | |
| 1833 | BORDETELLA | IELAGGRQVQPYIK | 2716 | ABO77783.1 |
| | PERTUSSIS | | | |
| 1834 | BORDETELLA | IHIQGSDPGGVRTA | 2717 | ABO77783.1 |
| | PERTUSSIS | | | |
| 1835 | BORDETELLA | IRRFLGTVTVKAGK | 2718 | ABO77783.1 |
| | PERTUSSIS | | | |
| 1836 | BORDETELLA | IRVGRGARVTVSGG | 2719 | ABO77783.1 |
| | PERTUSSIS | | | |
| 1837 | BORDETELLA | ITLQAGAHA | 2720 | ABO77783.1 |
| | PERTUSSIS | | | |
| 1838 | BORDETELLA | ITLQAGAHAQGKAL | 2721 | ABO77783.1 |
| | PERTUSSIS | | | |
| 1839 | BORDETELLA | IVEAPELGAAIRVG | 2722 | ABO77783.1 |
| | PERTUSSIS | | | |
| 1840 | BORDETELLA | IVKTGERQHGIHIQ | 2723 | ABO77783.1 |
| | PERTUSSIS | | | |
| 1841 | BORDETELLA | KAGKLVADHATLAN | 2724 | ABO77783.1 |
| | PERTUSSIS | | | |
| 1842 | BORDETELLA | KGKYRTHGVGASLE | 2725 | ABO77783.1 |
| | PERTUSSIS | | | |
| 1843 | BORDETELLA | KPAPQPGPQPPQPP | 2726 | ABO77783.1 |
| | PERTUSSIS | | | |
| 1844 | BORDETELLA | KVAGFELGADHAVA | 2727 | ABO77783.1 |
| | PERTUSSIS | | | |
| 1845 | BORDETELLA | KVAGSDGYAVKGKY | 2728 | ABO77783.1 |
| | PERTUSSIS | | | |
| 1846 | BORDETELLA | KVDIGTYRYRLAAN | 2729 | ABO77783.1 |
| | PERTUSSIS | | | |
| 1847 | BORDETELLA | KVLTVNTLAGSGLF | 2730 | ABO77783.1 |
| | PERTUSSIS | | | |
| 1848 | BORDETELLA | LAANGNGQWSLVGA | 2731 | ABO77783.1 |
| | PERTUSSIS | | | |
| 1849 | BORDETELLA | LAMPWTFHAGYRYS | 2732 | ABO77783.1 |
| | PERTUSSIS | | | |
| 1850 | BORDETELLA | LASTLWYAESNALS | 2733 | ABO77783.1 |
| | PERTUSSIS | | | |
| 1851 | BORDETELLA | LENDFKVAGSDGYA | 2734 | ABO77783.1 |
| | PERTUSSIS | | | |
| 1852 | BORDETELLA | LENPAAELQFRNGS | 2735 | ABO77783.1 |
| | PERTUSSIS | | | |
| 1853 | BORDETELLA | LGAAPAAHADWNNQ | 2736 | ABO77783.1 |
| | PERTUSSIS | | | |
| 1854 | BORDETELLA | LGGLAGYTRGDRGFTGDG | 2737 | ABO77783.1 |
| | PERTUSSIS | | | |
| 1855 | BORDETELLA | LLENP | 2738 | ABO77783.1 |
| | PERTUSSIS | | | |
| 1856 | BORDETELLA | LLVQTPLGSAATFT | 2739 | ABO77783.1 |
| | PERTUSSIS | | | |
| 1857 | BORDETELLA | LPPSRVVLRDTNVT | 2740 | ABO77783.1 |
| | PERTUSSIS | | | |
| 1858 | BORDETELLA | LQPEDLPPS | 2741 | ABO77783.1 |
| | PERTUSSIS | | | |
| 1859 | BORDETELLA | LQPEDLPPSRVVLR | 2742 | ABO77783.1 |
| | PERTUSSIS | | | |
| 1860 | BORDETELLA | LRASRLENDFKVAG | 2743 | ABO77783.1 |
| | PERTUSSIS | | | |
| 1861 | BORDETELLA | LRLASDGSVDFQQP | 2744 | ABO77783.1 |
| | PERTUSSIS | | | |
| 1862 | BORDETELLA | LSAAANAAVNTGGV | 2745 | ABO77783.1 |
| | PERTUSSIS | | | |
| 1863 | BORDETELLA | LSAPHGNVIETGGA | 2746 | ABO77783.1 |
| | PERTUSSIS | | | |
| 1864 | BORDETELLA | LSDDGIRRFLGTVT | 2747 | ABO77783.1 |
| | PERTUSSIS | | | |
| 1865 | BORDETELLA | LVGAKAPPAPKPAP | 2748 | ABO77783.1 |
| | PERTUSSIS | | | |
| 1866 | BORDETELLA | LYVAGEQAQASIAD | 2749 | ABO77783.1 |
| | PERTUSSIS | | | |
| 1867 | BORDETELLA | MALGALGAAPAAHA | 2750 | ABO77783.1 |
| | PERTUSSIS | | | |
| 1868 | BORDETELLA | MNMSLSRIVKAAPL | 2751 | ABO77783.1 |
| | PERTUSSIS | | | |
| 1869 | BORDETELLA | MQDASGQHR | 2752 | ABO77783.1 |
| | PERTUSSIS | | | |
| 1870 | BORDETELLA | MQGAVVHLQRATIR | 2753 | ABO77783.1 |
| | PERTUSSIS | | | |
| 1871 | BORDETELLA | NAAVNTGGVGLAST | 2754 | ABO77783.1 |
| | PERTUSSIS | | | |
| 1872 | BORDETELLA | NALSKRLGELRLNP | 2755 | ABO77783.1 |
| | PERTUSSIS | | | |
| 1873 | BORDETELLA | NGQWSLVGAKAPPA | 2756 | ABO77783.1 |
| | PERTUSSIS | | | |
| 1874 | BORDETELLA | NTLAGSGLFRMNVF | 2757 | ABO77783.1 |
| | PERTUSSIS | | | |
| 1875 | BORDETELLA | PAGRELSAAANAAV | 2758 | ABO77783.1 |
| | PERTUSSIS | | | |
| 1876 | BORDETELLA | PAPQPPAGRELSAA | 2759 | ABO77783.1 |
| | PERTUSSIS | | | |
| 1877 | BORDETELLA | PGPQPPQPPQPQPE | 2760 | ABO77783.1 |
| | PERTUSSIS | | | |
| 1878 | BORDETELLA | PGTSIGPLDVALAS | 2761 | ABO77783.1 |
| | PERTUSSIS | | | |
| 1879 | BORDETELLA | PLGSAATFTLANKD | 2762 | ABO77783.1 |
| | PERTUSSIS | | | |
| 1880 | BORDETELLA | PQPEAPAPQPPAGR | 2763 | ABO77783.1 |
| | PERTUSSIS | | | |
| 1881 | BORDETELLA | PQPPQPQPEAPAPQ | 2764 | ABO77783.1 |
| | PERTUSSIS | | | |
| 1882 | BORDETELLA | PYIKASVLQEFDGA | 2765 | ABO77783.1 |
| | PERTUSSIS | | | |
| 1883 | BORDETELLA | RFAPQAAPLSITLQ | 2766 | ABO77783.1 |
| | PERTUSSIS | | | |
| 1884 | BORDETELLA | RLGELRLNPDAGGA | 2767 | ABO77783.1 |
| | PERTUSSIS | | | |
| 1885 | BORDETELLA | RLNPDAGGAWGRGF | 2768 | ABO77783.1 |
| | PERTUSSIS | | | |
| 1886 | BORDETELLA | RNGSVTSSGQLSDD | 2769 | ABO77783.1 |
| | PERTUSSIS | | | |
| 1887 | BORDETELLA | RRFDQKVAGFELGA | 2770 | ABO77783.1 |
| | PERTUSSIS | | | |
| 1888 | BORDETELLA | RTTLAMALGALGAA | 2771 | ABO77783.1 |
| | PERTUSSIS | | | |
| 1889 | BORDETELLA | SAIVDGGLHIGALQ | 2772 | ABO77783.1 |
| | PERTUSSIS | | | |
| 1890 | BORDETELLA | SANTLLLVQTPLGS | 2773 | ABO77783.1 |
| | PERTUSSIS | | | |
| 1891 | BORDETELLA | SDPGGVRTASGTTI | 2774 | ABO77783.1 |
| | PERTUSSIS | | | |
| 1892 | BORDETELLA | SELTLDGGHITGGR | 2775 | ABO77783.1 |
| | PERTUSSIS | | | |
| 1893 | BORDETELLA | SGLFRMNVF | 2776 | ABO77783.1 |
| | PERTUSSIS | | | |
| 1894 | BORDETELLA | SGLFRMNVFADLGL | 2777 | ABO77783.1 |
| | PERTUSSIS | | | |
| 1895 | BORDETELLA | SGSSVELAQSIVEA | 2778 | ABO77783.1 |
| | PERTUSSIS | | | |
| 1896 | BORDETELLA | SIADSTLQGAGGVQ | 2779 | ABO77783.1 |
| | PERTUSSIS | | | |
| 1897 | BORDETELLA | SKGPKLAMPWTFHA | 2780 | ABO77783.1 |
| | PERTUSSIS | | | |
| 1898 | BORDETELLA | SNVGALRLASDGSV | 2781 | ABO77783.1 |
| | PERTUSSIS | | | |
| 1899 | BORDETELLA | SRIVKAAPLRRTTL | 2782 | ABO77783.1 |
| | PERTUSSIS | | | |
| 1900 | BORDETELLA | SVLGASELTLDGGH | 2783 | ABO77783.1 |
| | PERTUSSIS | | | |
| 1901 | BORDETELLA | SVLQEFDGA | 2784 | ABO77783.1 |
| | PERTUSSIS | | | |
| 1902 | BORDETELLA | SVLQEFDGAGTVHT | 2785 | ABO77783.1 |
| | PERTUSSIS | | | |
| 1903 | BORDETELLA | TELR | 2786 | ABO77783.1 |
| | PERTUSSIS | | | |
| 1904 | BORDETELLA | TELRGTRAELGLGM | 2787 | ABO77783.1 |
| | PERTUSSIS | | | |
| 1905 | BORDETELLA | TGDGGGHTDSVHVG | 2788 | ABO77783.1 |
| | PERTUSSIS | | | |
| 1906 | BORDETELLA | TGGARRFAPQAAPL | 2789 | ABO77783.1 |
| | PERTUSSIS | | | |
| 1907 | BORDETELLA | TGGRAAGVAAMQGA | 2790 | ABO77783.1 |
| | PERTUSSIS | | | |
| 1908 | BORDETELLA | TGGVGLASTLWYAE | 2791 | ABO77783.1 |
| | PERTUSSIS | | | |
| 1909 | BORDETELLA | THGVGASLEAGRRF | 2792 | ABO77783.1 |
| | PERTUSSIS | | | |
| 1910 | BORDETELLA | TIRRGDAPA | 2793 | ABO77783.1 |
| | PERTUSSIS | | | |
| 1911 | BORDETELLA | TLANVGDTWDDDGI | 2794 | ABO77783.1 |
| | PERTUSSIS | | | |
| 1912 | BORDETELLA | TLQGAGGVQIERGA | 2795 | ABO77783.1 |
| | PERTUSSIS | | | |
| 1913 | BORDETELLA | TLTGGADAQGDIVA | 2796 | ABO77783.1 |
| | PERTUSSIS | | | |
| 1914 | BORDETELLA | TNVTAVPASGAPAA | 2797 | ABO77783.1 |
| | PERTUSSIS | | | |
| 1915 | BORDETELLA | TRAELGLGMAAALG | 2798 | ABO77783.1 |
| | PERTUSSIS | | | |
| 1916 | BORDETELLA | TSSGQLSDDGIRRF | 2799 | ABO77783.1 |
| | PERTUSSIS | | | |
| 1917 | BORDETELLA | TVHTNGIAHRTELR | 2800 | ABO77783.1 |
| | PERTUSSIS | | | |
| 1918 | BORDETELLA | TYRYRLAANGNGQW | 2801 | ABO77783.1 |
| | PERTUSSIS | | | |
| 1919 | BORDETELLA | VADHATLANVGDTW | 2802 | ABO77783.1 |
| | PERTUSSIS | | | |
| 1920 | BORDETELLA | VHVGGYATYIADSG | 2803 | ABO77783.1 |
| | PERTUSSIS | | | |
| 1921 | BORDETELLA | VLDGWYGVD | 2804 | ABO77783.1 |
| | PERTUSSIS | | | |
| 1922 | BORDETELLA | VPASGAPAAVSVLG | 2805 | ABO77783.1 |
| | PERTUSSIS | | | |
| 1923 | BORDETELLA | VRDEGGSSVLGRLG | 2806 | ABO77783.1 |
| | PERTUSSIS | | | |
| 1924 | BORDETELLA | VRTASGTTIKVSGR | 2807 | ABO77783.1 |
| | PERTUSSIS | | | |
| 1925 | BORDETELLA | VSGGSLSAPHGNVI | 2808 | ABO77783.1 |
| | PERTUSSIS | | | |
| 1926 | BORDETELLA | VSGRQAQGILLENP | 2809 | ABO77783.1 |
| | PERTUSSIS | | | |
| 1927 | BORDETELLA | VTVQRSAIVDGGLH | 2810 | ABO77783.1 |
| | PERTUSSIS | | | |
| 1928 | BORDETELLA | VVLRDTNVTAVPAS | 2811 | ABO77783.1 |
| | PERTUSSIS | | | |
| 1929 | BORDETELLA | WNNQSIVKTGERQH | 2812 | ABO77783.1 |
| | PERTUSSIS | | | |
| 1930 | BORDETELLA | WVRNSGSEPASANT | 2813 | ABO77783.1 |
| | PERTUSSIS | | | |
| 1931 | BORDETELLA | WYAESNALSKRLGE | 2814 | ABO77783.1 |
| | PERTUSSIS | | | |
| 1932 | BORDETELLA | YATYIADSGFYLDA | 2815 | ABO77783.1 |
| | PERTUSSIS | | | |
| 1933 | BORDETELLA | YGVDVSGSS | 2816 | ABO77783.1 |
| | PERTUSSIS | | | |
| 1934 | BORDETELLA | YGVDVSGSSVELAQ | 2817 | ABO77783.1 |
| | PERTUSSIS | | | |
| 1935 | BORDETELLA | YLDATLRASRLEND | 2818 | ABO77783.1 |
| | PERTUSSIS | | | |
| 1936 | BORDETELLA | YRVLPEPVKLTLTG | 2819 | ABO77783.1 |
| | PERTUSSIS | | | |
| 1937 | BORDETELLA | VKAQNITNKRAALIEA | 2820 | AAA22974.1 |
| | PERTUSSIS | | | |
| 1938 | BORDETELLA | YYSNVTATRLLSSTNS | 2821 | AAA83981.1 |
| | PERTUSSIS | | | |
| 1939 | BORDETELLA | SPNLTDERAAQAGVT | 2822 | CPP72976.1 |
| | PERTUSSIS | | | |
| 1940 | MEASLES | SSRASDERAAHLPTS | 2823 | BAA33867.1 |
| | MORBILLIVIRUS | | | |
| 1941 | CORYNEBACTERIUM | QVVHNSYNRPAYSPG | 2824 | 1007216A |
| | DIPHTHERIAE | | | |
| 1942 | MEASLES VIRUS | AEGGEIHEL | 2825 | AAF85692.1 |
| | STRAIN | | | |
| | EDMONSTON-B | | | |
| 1943 | MEASLES VIRUS | AENLISNGIGKY | 2826 | AAF85698.1 |
| | STRAIN | | | |
| | EDMONSTON-B | | | |
| 1944 | MEASLES VIRUS | AEVDGDVKL | 2827 | CAB43772.1 |
| | STRAIN | | | |
| | EDMONSTON-B | | | |
| 1945 | MEASLES VIRUS | AIYTAEIHK | 2828 | AAF85697.1 |
| | STRAIN | | | |
| | EDMONSTON-B | | | |
| 1946 | MEASLES VIRUS | APVFHMTNY | 2829 | CAB43772.1 |
| | STRAIN | | | |
| | EDMONSTON-B | | | |
| 1947 | MEASLES VIRUS | APVFHMTNYLEQPVSN | 2830 | AAR89413.1 |
| | STRAIN | | | |
| | EDMONSTON-B | | | |
| 1948 | MEASLES VIRUS | AQRLNEIY | 2831 | AAF85698.1 |
| | STRAIN | | | |
| | EDMONSTON-B | | | |
| 1949 | MEASLES VIRUS | ARVPHAYSL | 2832 | AAF85698.1 |
| | STRAIN | | | |
| | EDMONSTON-B | | | |
| 1950 | MEASLES VIRUS | AVRDLERAM | 2833 | PO3424.1 |
| | STRAIN | | | |
| | EDMONSTON-B | | | |
| 1951 | MEASLES VIRUS | AVRDLERAMTTLK | 2834 | PO3424.1 |
| | STRAIN | | | |
| | EDMONSTON-B | | | |
| 1952 | MEASLES VIRUS | DALLRLQAM | 2835 | Q89933.1 |
| | STRAIN | | | |
| | EDMONSTON-B | | | |
| 1953 | MEASLES VIRUS | DIKEKVINL | 2836 | AAF85698.1 |
| | STRAIN | | | |
| | EDMONSTON-B | | | |
| 1954 | MEASLES VIRUS | DQGLFKVL | 2837 | AAF85695.1 |
| | STRAIN | | | |
| | EDMONSTON-B | | | |
| 1955 | MEASLES VIRUS | DTGVDTRIW | 2838 | Q9EMA9.1 |
| | STRAIN | | | |
| | EDMONSTON-B | | | |
| 1956 | MEASLES VIRUS | EPIGSLAIEEAM | 2839 | AAF85692.1 |
| | STRAIN | | | |
| | EDMONSTON-B | | | |
| 1957 | MEASLES VIRUS | EPIRD ALNAM | 2840 | P69354.1 |
| | STRAIN | | | |
| | EDMONSTON-B | | | |
| 1958 | MEASLES VIRUS | FPKLGKTL | 2841 | AAF85692.1 |
| | STRAIN | | | |
| | EDMONSTON-B | | | |
| 1959 | MEASLES VIRUS | FRSVNAVAF | 2842 | AAF85695.1 |
| | STRAIN | | | |
| | EDMONSTON-B | | | |
| 1960 | MEASLES VIRUS | GKIIDNTEQL | 2843 | AAF85695.1 |
| | STRAIN | | | |
| | EDMONSTON-B | | | |
| 1961 | MEASLES VIRUS | GLNEKLVFY | 2844 | AAF85695.1 |
| | STRAIN | | | |
| | EDMONSTON-B | | | |
| 1962 | MEASLES VIRUS | GMYGGTYLVEK | 2845 | AAC35876.2 |
| | STRAIN | | | |
| | EDMONSTON-B | | | |
| 1963 | MEASLES VIRUS | GPPISLERLDVGTN | 2846 | P69354.1 |
| | STRAIN | | | |
| | EDMONSTON-B | | | |
| 1964 | MEASLES VIRUS | GPRQAQVSFL | 2847 | Q89933.1 |
| | STRAIN | | | |
| | EDMONSTON-B | | | |
| 1965 | MEASLES VIRUS | GRLVPQVRVID | 2848 | AAF85695.1 |
| | STRAIN | | | |
| | EDMONSTON-B | | | |
| 1966 | MEASLES VIRUS | GSAPISMGFR | 2849 | AAF85692.1 |
| | STRAIN | | | |
| | EDMONSTON-B | | | |
| 1967 | MEASLES VIRUS | HILAKSTAL | 2850 | AAF85698.1 |
| | STRAIN | | | |
| | EDMONSTON-B | | | |
| 1968 | MEASLES VIRUS | HYREVNLVY | 2851 | AAF85698.1 |
| | STRAIN | | | |
| | EDMONSTON-B | | | |
| 1969 | MEASLES VIRUS | IPPMKNLAL | 2852 | AAC35876.2 |
| | STRAIN | | | |
| | EDMONSTON-B | | | |
| 1970 | MEASLES VIRUS | IPYQGSGKGVSF | 2853 | CAB43772.1 |
| | STRAIN | | | |
| | EDMONSTON-B | | | |
| 1971 | MEASLES VIRUS | ISKESQHVY | 2854 | AAF85698.1 |
| | STRAIN | | | |
| | EDMONSTON-B | | | |
| 1972 | MEASLES VIRUS | IVSSHFFVY | 2855 | AAF85698.1 |
| | STRAIN | | | |
| | EDMONSTON-B | | | |
| 1973 | MEASLES VIRUS | KEIKETGRLF | 2856 | AAF85698.1 |
| | STRAIN | | | |
| | EDMONSTON-B | | | |
| 1974 | MEASLES VIRUS | KESQHVYYL | 2857 | AAF85698.1 |
| | STRAIN | | | |
| | EDMONSTON-B | | | |
| 1975 | MEASLES VIRUS | KIIDNTEQL | 2858 | AAF85695.1 |
| | STRAIN | | | |
| | EDMONSTON-B | | | |
| 1976 | MEASLES VIRUS | KKQINRQN | 2859 | AAA63285.1 |
| | STRAIN | | | |
| | EDMONSTON-B | | | |
| 1977 | MEASLES VIRUS | KKVDTNFIYQ | 2860 | AAF85698.1 |
| | STRAIN | | | |
| | EDMONSTON-B | | | |
| 1978 | MEASLES VIRUS | KLIDGFFPA | 2861 | AAF85698.1 |
| | STRAIN | | | |
| | EDMONSTON-B | | | |
| 1979 | MEASLES VIRUS | KPNLSSKRSEL | 2862 | BAB39848.1 |
| | STRAIN | | | |
| | EDMONSTON-B | | | |
| 1980 | MEASLES VIRUS | KVSPYLFTV | 2863 | AAR89413.1 |
| | STRAIN | | | |
| | EDMONSTON-B | | | |
| 1981 | MEASLES VIRUS | LETRTTNQFL | 2864 | CAB43772.1 |
| | STRAIN | | | |
| | EDMONSTON-B | | | |
| 1982 | MEASLES VIRUS | LLKEATEL | 2865 | AAF85695.1 |
| | STRAIN | | | |
| | EDMONSTON-B | | | |
| 1983 | MEASLES VIRUS | LLKKGNSLY | 2866 | AAF85698.1 |
| | STRAIN | | | |
| | EDMONSTON-B | | | |
| 1984 | MEASLES VIRUS | LPAPIGGMNY | 2867 | AAF85698.1 |
| | STRAIN | | | |
| | EDMONSTON-B | | | |
| 1985 | MEASLES VIRUS | MPEETLHQVM | 2868 | AAF85698.1 |
| | STRAIN | | | |
| | EDMONSTON-B | | | |
| 1986 | MEASLES VIRUS | PTTIRGQFS | 2869 | CAB43772.1 |
| | STRAIN | | | |
| | EDMONSTON-B | | | |
| 1987 | MEASLES VIRUS | QEISRHQALGY | 2870 | PO3424.1 |
| | STRAIN | | | |
| | EDMONSTON-B | | | |
| 1988 | MEASLES VIRUS | RITHVDTESY | 2871 | P69354.1 |
| | STRAIN | | | |
| | EDMONSTON-B | | | |
| 1989 | MEASLES VIRUS | RPGLKPDL | 2872 | P69354.1 |
| | STRAIN | | | |
| | EDMONSTON-B | | | |
| 1990 | MEASLES VIRUS | RPIYGLEV | 2873 | AAF85698.1 |
| | STRAIN | | | |
| | EDMONSTON-B | | | |
| 1991 | MEASLES VIRUS | RQAGQEMILAV | 2874 | P69354.1 |
| | STRAIN | | | |
| | EDMONSTON-B | | | |
| 1992 | MEASLES VIRUS | SAVRIATVY | 2875 | AAF85698.1 |
| | STRAIN | | | |
| | EDMONSTON-B | | | |
| 1993 | MEASLES VIRUS | SLMPEETLHQV | 2876 | AAF85698.1 |
| | STRAIN | | | |
| | EDMONSTON-B | | | |
| 1994 | MEASLES VIRUS | SMIDLVTKF | 2877 | AAF85698.1 |
| | STRAIN | | | |
| | EDMONSTON-B | | | |
| 1995 | MEASLES VIRUS | SMLNSQAIDNLRA | 2878 | P69354.1 |
| | STRAIN | | | |
| | EDMONSTON-B | | | |
| 1996 | MEASLES VIRUS | SMYRVFEV | 2879 | CAB43772.1 |
| | STRAIN | | | |
| | EDMONSTON-B | | | |
| 1997 | MEASLES VIRUS | SQQGMFHAY | 2880 | AAF85698.1 |
| | STRAIN | | | |
| | EDMONSTON-B | | | |
| 1998 | MEASLES VIRUS | TDTPIVYNDRNLLD | 2881 | Q89933.1 |
| | STRAIN | | | |
| | EDMONSTON-B | | | |
| 1999 | MEASLES VIRUS | VIINDDQGLFKV | 2882 | AAF85695.1 |
| | STRAIN | | | |
| | EDMONSTON-B | | | |
| 2000 | MEASLES VIRUS | YESGVRIASL | 2883 | AAF85698.1 |
| | STRAIN | | | |
| | EDMONSTON-B | | | |
| 2001 | MEASLES VIRUS | YLKDKALA | 2884 | AAF85698.1 |
| | STRAIN | | | |
| | EDMONSTON-B | | | |
| 2002 | MEASLES VIRUS | YVYDHSGEAVK | 2885 | AAF85692.1 |
| | STRAIN | | | |
| | EDMONSTON-B | | | |
| 2003 | RUBELLA VIRUS | ARVIDPAAQSFTGVV | 2886 | BAA28178.1 |
| 2004 | RUBELLA VIRUS | SDRASARVIDPAAQS | 2887 | BAA28178.1 |
| 2005 | RUBELLA VIRUS | VPPGKFVTAALLNTP | 2888 | BAA28178.1 |
| 2006 | RUBELLA VIRUS | WVTPVIGSQARKCGL | 2889 | BAA28178.1 |
| 2007 | MUMPS | GTYRLIPNARANLTA | 400 | AGC97176.1 |
| | RUBULAVIRUS | | | |

[0870] E. Delivery of Multi-Flap Prime Editors

[0871] In another aspect, the present disclosure provides for the delivery of multi-flap prime editors in vitro and in vivo using various strategies, including on separate vectors using split inteins and as well as direct delivery strategies of the ribonucleoprotein complex (i.e., the prime editor complexed to the PEgRNA and/or the second-site gRNA) using techniques such as electroporation, use of cationic lipid-mediated formulations, and induced endocytosis methods using receptor ligands fused to to the ribonucleotprotein complexes. Any such methods are contemplated herein.

### Overview of Delivery Options

[0872] In some aspects, the invention provides methods comprising delivering one or more multi-flap prime editor-encoding polynucleotides, such as or one or more vectors as described herein encoding one or more components of the multi-flap prime editing system described herein, one or more transcripts thereof, and/or one or proteins transcribed therefrom, to a host cell. In some aspects, the invention further provides cells produced by such methods, and organisms (such as animals, plants, or fungi) comprising or produced from such cells. In some embodiments, a multi-flap prime editor as described herein in combination with (and optionally complexed with) a guide sequence is delivered to a cell. Conventional viral and non-viral based gene transfer methods can be used to introduce nucleic acids in mammalian cells or target tissues. Such methods can be used to administer nucleic acids encoding components of a multi-flap prime editor system to cells in culture, or in a host organism. Non-viral vector delivery systems include DNA plasmids, RNA (e.g. a transcript of a vector described herein), naked nucleic acid, and nucleic acid complexed with a delivery vehicle, such as a liposome. Viral vector delivery systems include DNA and RNA viruses, which have either episomal or integrated genomes after delivery to the cell. For a review of gene therapy procedures, see Anderson, Science 256:808-813 (1992); Nabel & Felgner, TIBTECH 11:211-217 (1993); Mitani & Caskey, TIBTECH 11:162-166 (1993); Dillon, TIBTECH 11:167-175 (1993); Miller, Nature 357:455-460 (1992); Van Brunt, Biotechnology 6(10):1149-1154 (1988); Vigne, Restorative Neurology and Neuroscience 8:35-36 (1995); Kremer & Perricaudet, British Medical Bulletin 51(1):31-44 (1995); Haddada et al., in Current Topics in Microbiology and Immunology Doerfler and Bihm (eds) (1995); and Yu et al., Gene Therapy 1:13-26 (1994).

[0873] Methods of non-viral delivery of nucleic acids include lipofection, nucleofection, microinjection, biolistics, virosomes, liposomes, immunoliposomes, polycation or lipid:nucleic acid conjugates, naked DNA, artificial virions, and agent-enhanced uptake of DNA. Lipofection is described in e.g., U.S. Pat. Nos. 5,049,386, 4,946,787; and 4,897,355) and lipofection reagents are sold commercially (e.g., Transfectam™ and Lipofectin™). Cationic and neutral lipids that are suitable for efficient receptor-recognition lipofection of polynucleotides include those of Feigner, WO 91/17424; WO 91/16024. Delivery can be to cells (e.g. in vitro or ex vivo administration) or target tissues (e.g. in vivo administration).

[0874] The preparation of lipid:nucleic acid complexes, including targeted liposomes such as immunolipid complexes, is well known to one of skill in the art (see, e.g., Crystal, Science 270:404-410 (1995); Blaese et al., Cancer Gene Ther. 2:291-297 (1995); Behr et al., Bioconjugate Chem. 5:382-389 (1994); Remy et al., Bioconjugate Chem. 5:647-654 (1994); Gao et al., Gene Therapy 2:710-722 (1995); Ahmad et al., Cancer Res. 52:4817-4820 (1992); U.S. Pat. Nos. 4,186,183, 4,217,344, 4,235,871, 4,261,975, 4,485,054, 4,501,728, 4,774,085, 4,837,028, and 4,946,787).

[0875] The use of RNA or DNA viral based systems for the delivery of nucleic acids take advantage of highly evolved processes for targeting a virus to specific cells in the body and trafficking the viral payload to the nucleus. Viral vectors can be administered directly to patients (in vivo) or they can be used to treat cells in vitro, and the modified cells may optionally be administered to patients (ex vivo). Conventional viral based systems could include retroviral, lentivirus, adenoviral, adeno-associated and herpes simplex virus vectors for gene transfer. Integration in the host genome is possible with the retrovirus, lentivirus, and adeno-associated virus gene transfer methods, often resulting in long term expression of the inserted transgene. Additionally, high transduction efficiencies have been observed in many different cell types and target tissues.

[0876] The tropism of a viruses can be altered by incorporating foreign envelope proteins, expanding the potential target population of target cells. Lentiviral vectors are retroviral vectors that are able to transduce or infect non-dividing cells and typically produce high viral titers. Selection of a retroviral gene transfer system would therefore depend on the target tissue. Retroviral vectors are comprised of cis-acting long terminal repeats with packaging capacity for up to 6-10 kb of foreign sequence. The minimum cis-acting LTRs are sufficient for replication and packaging of the vectors, which are then used to integrate the therapeutic gene into the target cell to provide permanent transgene expression. Widely used retroviral vectors include those based upon murine leukemia virus (MuLV), gibbon ape leukemia virus (GaLV), Simian Immuno deficiency virus (SIV), human immuno deficiency virus (HIV), and combinations thereof (see, e.g., Buchscher et al., J. Virol. 66:2731-2739 (1992); Johann et al., J. Virol. 66:1635-1640 (1992); Sommnerfelt et al., Virol. 176:58-59 (1990); Wilson et al., J. Virol. 63:2374-2378 (1989); Miller et al., J. Virol. 65:2220-2224 (1991); PCT/US94/05700). In applications where transient expression is preferred, adenoviral based systems may be used. Adenoviral based vectors are capable of very high transduction efficiency in many cell types and do not require cell division. With such vectors, high titer and levels of expression have been obtained. This vector can be produced in large quantities in a relatively simple system. Adeno-associated virus (“AAV”) vectors may also be used to transduce cells with target nucleic acids, e.g., in the in vitro production of nucleic acids and peptides, and for in vivo and ex vivo gene therapy procedures (see, e.g., West et al., Virology 160:38-47 (1987); U.S. Pat. No. 4,797,368; WO 93/24641; Kotin, Human Gene Therapy 5:793-801 (1994); Muzyczka, J. Clin. Invest. 94:1351 (1994). Construction of recombinant AAV vectors are described in a number of publications, including U.S. Pat. No. 5,173,414; Tratschin et al., Mol. Cell. Biol. 5:3251-3260 (1985); Tratschin, et al., Mol. Cell. Biol. 4:2072-2081 (1984); Hermonat & Muzyczka, PNAS 81:6466-6470 (1984); and Samulski et al., J. Virol. 63:03822-3828 (1989).

[0877] Packaging cells are typically used to form virus particles that are capable of infecting a host cell. Such cells include 293 cells, which package adenovirus, and ψ2 cells or PA317 cells, which package retrovirus. Viral vectors used in gene therapy are usually generated by producing a cell line that packages a nucleic acid vector into a viral particle. The vectors typically contain the minimal viral sequences required for packaging and subsequent integration into a host, other viral sequences being replaced by an expression cassette for the polynucleotide(s) to be expressed. The missing viral functions are typically supplied in trans by the packaging cell line. For example, AAV vectors used in gene therapy typically only possess ITR sequences from the AAV genome which are required for packaging and integration into the host genome. Viral DNA is packaged in a cell line, which contains a helper plasmid encoding the other AAV genes, namely rep and cap, but lacking ITR sequences. The cell line may also be infected with adenovirus as a helper. The helper virus promotes replication of the AAV vector and expression of AAV genes from the helper plasmid. The helper plasmid is not packaged in significant amounts due to a lack of ITR sequences. Contamination with adenovirus can be reduced by, e.g., heat treatment to which adenovirus is more sensitive than AAV. Additional methods for the delivery of nucleic acids to cells are known to those skilled in the art. See, for example, US20030087817, incorporated herein by reference.

[0878] In various embodiments, the dual PE constructs (including, the split-constructs) may be engineered for delivery in one or more rAAV vectors. An rAAV as related to any of the methods and compositions provided herein may be of any serotype including any derivative or pseudotype (e.g., 1, 2, 3, 4, 5, 6, 7, 8, 9, 10, 11, 12, 13, 2/1, 2/5, 2/8, 2/9, 3/1, 3/5, 3/8, or 3/9). An rAAV may comprise a genetic load (i.e., a recombinant nucleic acid vector that expresses a gene of interest, such as a whole or split PE fusion protein that is carried by the rAAV into a cell) that is to be delivered to a cell. An rAAV may be chimeric.

[0879] As used herein, the serotype of an rAAV refers to the serotype of the capsid proteins of the recombinant virus. Non-limiting examples of derivatives and pseudotypes include rAAV2/1, rAAV2/5, rAAV2/8, rAAV2/9, AAV2-AAV3 hybrid, AAVrh.10, AAVhu.14, AAV3a/3b, AAVrh32.33, AAV-HSC15, AAV-HSC17, AAVhu.37, AAVrh.8, CHt-P6, AAV2.5, AAV6.2, AAV2i8, AAV-HSC15/17, AAVM41, AAV9.45, AAV6(Y445F/Y731F), AAV2.5T, AAV-HAE1/2, AAV clone 32/83, AAVShH10, AAV2 (Y->F), AAV8 (Y733F), AAV2.15, AAV2.4, AAVM41, and AAVr3.45. A non-limiting example of derivatives and pseudotypes that have chimeric VP1 proteins is rAAV2/5-1VP1u, which has the genome of AAV2, capsid backbone of AAV5 and VP1u of AAV1. Other non-limiting example of derivatives and pseudotypes that have chimeric VP1 proteins are rAAV2/5-8VP lu, rAAV2/9-1VP1u, and rAAV2/9-8VP1u.

[0880] AAV derivatives/pseudotypes, and methods of producing such derivatives/pseudotypes are known in the art (see, e.g., Mol Ther. 2012 April; 20(4):699-708. doi: 10.1038/mt.2011.287. Epub 2012 Jan. 24. The AAV vector toolkit: poised at the clinical crossroads. Asokan A1, Schaffer D V, Samulski R J.). Methods for producing and using pseudotyped rAAV vectors are known in the art (see, e.g., Duan et al., J. Virol., 75:7662-7671, 2001; Halbert et al., J. Virol., 74:1524-1532, 2000; Zolotukhin et al., Methods, 28:158-167, 2002; and Auricchio et al., Hum. Molec. Genet., 10:3075-3081, 2001).

[0881] Methods of making or packaging rAAV particles are known in the art and reagents are commercially available (see, e.g., Zolotukhin et al. Production and purification of serotype 1, 2, and 5 recombinant adeno-associated viral vectors. Methods 28 (2002) 158-167; and U.S. Patent Publication Numbers US20070015238 and US20120322861, which are incorporated herein by reference; and plasmids and kits available from ATCC and Cell Biolabs, Inc.). For example, a plasmid comprising a gene of interest may be combined with one or more helper plasmids, e.g., that contain a rep gene (e.g., encoding Rep78, Rep68, Rep52 and Rep40) and a cap gene (encoding VP1, VP2, and VP3, including a modified VP2 region as described herein), and transfected into a recombinant cells such that the rAAV particle can be packaged and subsequently purified.

[0882] Recombinant AAV may comprise a nucleic acid vector, which may comprise at a minimum: (a) one or more heterologous nucleic acid regions comprising a sequence encoding a protein or polypeptide of interest or an RNA of interest (e.g., a siRNA or microRNA), and (b) one or more regions comprising inverted terminal repeat (ITR) sequences (e.g., wild-type ITR sequences or engineered ITR sequences) flanking the one or more nucleic acid regions (e.g., heterologous nucleic acid regions). Herein, heterologous nucleic acid regions comprising a sequence encoding a protein of interest or RNA of interest are referred to as genes of interest.

[0883] Any one of the rAAV particles provided herein may have capsid proteins that have amino acids of different serotypes outside of the VP1u region. In some embodiments, the serotype of the backbone of the VP1 protein is different from the serotype of the ITRs and/or the Rep gene. In some embodiments, the serotype of the backbone of the VP1 capsid protein of a particle is the same as the serotype of the ITRs. In some embodiments, the serotype of the backbone of the VP1 capsid protein of a particle is the same as the serotype of the Rep gene. In some embodiments, capsid proteins of rAAV particles comprise amino acid mutations that result in improved transduction efficiency.

[0884] In some embodiments, the nucleic acid vector comprises one or more regions comprising a sequence that facilitates expression of the nucleic acid (e.g., the heterologous nucleic acid), e.g., expression control sequences operatively linked to the nucleic acid. Numerous such sequences are known in the art. Non-limiting examples of expression control sequences include promoters, insulators, silencers, response elements, introns, enhancers, initiation sites, termination signals, and poly(A) tails. Any combination of such control sequences is contemplated herein (e.g., a promoter and an enhancer).

[0885] Final AAV constructs may incorporate a sequence encoding the PEgRNA. In other embodiments, the AAV constructs may incorporate a sequence encoding the second-site nicking guide RNA. In still other embodiments, the AAV constructs may incorporate a sequence encoding the second-site nicking guide RNA and a sequence encoding the PEgRNA.

[0886] In various embodiments, the PEgRNAs and the second-site nicking guide RNAs can be expressed from an appropriate promoter, such as a human U6 (hU6) promoter, a mouse U6 (mU6) promoter, or other appropriate promoter. The PEgRNAs and the second-site nicking guide RNAs can be driven by the same promoters or different promoters.

[0887] In some embodiments, a rAAV constructs or the herein compositions are administered to a subject enterally. In some embodiments, a rAAV constructs or the herein compositions are administered to the subject parenterally. In some embodiments, a rAAV particle or the herein compositions are administered to a subject subcutaneously, intraocularly, intravitreally, subretinally, intravenously (IV), intracerebro-ventricularly, intramuscularly, intrathecally (IT), intracisternally, intraperitoneally, via inhalation, topically, or by direct injection to one or more cells, tissues, or organs. In some embodiments, a rAAV particle or the herein compositions are administered to the subject by injection into the hepatic artery or portal vein.

### Split Multi-Flap PE Vector-Based Strategies

[0888] In this aspect, the multi-flap prime editors can be divided at a split site and provided as two halves of a whole/complete prime editor. The two halves can be delivered to cells (e.g., as expressed proteins or on separate expression vectors) and once in contact inside the cell, the two halves form the complete prime editor through the self-splicing action of the inteins on each prime editor half. Split intein sequences can be engineered into each of the halves of the encoded prime editor to facilitate their transplicing inside the cell and the concomitant restoration of the complete, functioning PE.

[0889] These split intein-based methods overcome several barriers to in vivo delivery. For example, the DNA encoding prime editors is larger than the rAAV packaging limit, and so requires special solutions. One such solution is formulating the editor fused to split intein pairs that are packaged into two separate rAAV particles that, when co-delivered to a cell, reconstitute the functional editor protein. Several other special considerations to account for the unique features of multi-flap prime editing are described, including the optimization of second-site nicking targets and properly packaging multi-flap prime editors into virus vectors, including lentiviruses and rAAV.

[0890] In this aspect, the multi-flap prime editors can be divided at a split site and provided as two halves of a whole/complete prime editor. The two halves can be delivered to cells (e.g., as expressed proteins or on separate expression vectors) and once in contact inside the cell, the two halves form the complete prime editor through the self-splicing action of the inteins on each prime editor half. Split intein sequences can be engineered into each of the halves of the encoded prime editor to facilitate their transplicing inside the cell and the concomitant restoration of the complete, functioning PE.

[0891] FIG. 66 depicts depicts one embodiment of a prime editor being provided as two PE half proteins which regenerate as whole prime editor through the self-splicing action of the split-intein halves located at the end or beginning of each of the prime editor half proteins. The multi-flap prime editors described herein may also be provided in the same manner As used herein, the term “PE N-terminal half” refers to the N-terminal half of a complete prime editor and which comprises the “N intein” at the C-terminal end of the PE N-terminal half (i.e., the N-terminal extein) of the complete prime editor. The “N intein” refers to the N-terminal half of a complete, fully-formed split-intein moiety. As used herein, the term “PE C-terminal half” refers to the C-terminal half of a complete prime editor and which comprises the “C intein” at the N-terminal end of the C-terminal half (i.e., the C-terminal extein) of a complete prime editor. When the two half proteins, i.e., the PE N-terminal half and the PE C-terminal half, come into contact with one another, e.g., within the cell, the N intein and the C intein undergo the simultanous process of self-excision and the formation of a peptide bond between the C-terminal end of the PE N-terminal half and the N-terminal end of the PE C-terminal half to reform the complete prime editor protein comprising the complete napDNAbp domain (e.g., Cas9 nickase) and the RT domain Although not shown in the drawing, the prime editor may also comprise additional sequences including NLS at the N-terminus and/or C-terminus, as well as amino acid linkers sequences joining each domain

[0892] In various embodiments, the multi-flap prime editors may be engineered as two half proteins (i.e., a PE N-terminal half and a PE C-terminal half) by “splitting” the whole prime editor as a “split site.” The “split site” refers to the location of insertion of split intein sequences (i.e., the N intein and the C intein) between two adjacent amino acid residues in the prime editor. More specifically, the “split site” refers to the location of dividing the whole prime editor into two separate halves, wherein in each halve is fused at the split site to either the N intein or the C intein motifs. The split site can be at any suitable location in the prime editor fusion protein, but preferably the split site is located at a position that allows for the formation of two half proteins which are appropriately sized for delivery (e.g., by expression vector) and wherein the inteins, which are fused to each half protein at the split site termini, are available to sufficiently interact with one another when one half protein contacts the other half protein inside the cell.

[0893] In some embodiments, the split site is located in the napDNAbp domain In other embodiments, the split site is located in the RT domain In other embodiments, the split site is located in a linker that joins the napDNAbp domain and the RT domain

[0894] In various embodiments, split site design requires finding sites to split and insert an N- and C-terminal intein that are both structurally permissive for purposes of packaging the two half prime editor domains into two different AAV genomes. Additionally, intein residues necessary for trans splicing can be incorporated by mutating residues at the N terminus of the C terminal extein or inserting residues that will leave an intein “scar.”

[0895] Exemplary split configurations of split multi-flap (e.g., dual flap or quadruple flap) prime editors comprising either the SpCas9 nickase or the SaCas9 nickase are as follows.

S. PYOGENES PE, SPLIT AT LINKER, N TERMINAL PORTION
STRUCTURE: [N EXTEIN]-[N INTEIN]
(SEQ ID NO: 443)
MKRTADGSEFESPKKKRKVDKKYSIGLDIGTNSVGWAVITDEYKVPSKKFKVLGNTDRHSI
KKNLIGALLFDSGETAEATRLKRTARRRYTRRKNRICYLQEIFSNEMAKVDDSFFHRLEES
FLVEEDKKHERHPIFGNIVDEVAYHEKYPTIYHLRKKLVDSTDKADLRLIYLALAHMIKFR
GHFLIEGDLNPDNSDVDKLFIQLVQTYNQLFEENPINASGVDAKAILSARLSKSRRLENLIA
QLPGEKKNGLFGNLIALSLGLTPNFKSNFDLAEDAKLQLSKDTYDDDLDNLLAQIGDQYA
DLFLAAKNLSDAILLSDILRVNTEITKAPLSASMIKRYDEHHQDLTLLKALVRQQLPEKYK
EIFFDQSKNGYAGYIDGGASQEEFYKFIKPILEKMDGTEELLVKLNREDLLRKQRTFDNG
SIPHQIHLGELHAILRRQEDFYPFLKDNREKIEKILTFRIPYYVGPLARGNSRFAWMTRKS
EETITPWNFEEVVDKGASAQSFIERMTNFDKNLPNEKVLPKHSLLYEYFTVYNELTKVKY
VTEGMRKPAFLSGEQKKAIVDLLFKTNRKVTVKQLKEDYFKKIECFDSVEISGVEDRFNA
SLGTYHDLLKIIKDKDFLDNEENEDILEDIVLTLTLFEDREMIEERLKTYAHLFDDKVMKQ
LKRRRYTGWGRLSRKLINGIRDKQSGKTILDFLKSDGFANRNFMQLIHDDSLTFKEDIQK
AQVSGQGDSLHEHIANLAGSPAIKKGILQTVKVVDELVKVMGRHKPENIVIEMARENQTT
QKGQKNSRERMKRIEEGIKELGSQILKEHPVENTQLQNEKLYLYYLQNGRDMYVDQEL
DINRLSDYDVDAIVPQSFLKDDSIDNKVLTRSDKNRGKSDNVPSEEVVKKMKNYWRQLL
NAKLITQRKFDNLTKAERGGLSELDKAGFIKRQLVETRQITKHVAQILDSRMNTKYDEND
KLIREVKVITLKSKLVSDFRKDFQFYKVREINNYHHAHDAYLNAVVGTALIKKYPKLESEF
VYGDYKYYDVRKMIAKSEQEIGKATAKYFFYSNIMNFFKTEITLANGEIRKRPLIETNGET
GEIVWDKGRDFATVRKVLSMPQVNIVKKTEVQTGGFSKESILPKRNSDKLIARKKDWDP
KKYGGFDSPTVAYSVLVVAKVEKGKSKKLKSVKELLGITIMERSSFEKNPIDFLEAKGYKE
VKKDLIIKLPKYSLFELENGRKRMLASAGELQKGNELALPSKYVNFLYLASHYEKLKGSP
EDNEQKQLFVEQHKHYLDEIIEQISEFSKRVILADANLDKVLSAYNKHRDKPIREQAENII
HLFTLTNLGAPAAFKYFDTTIDRKRYTSTKEVLDATLIHQSITGLYETRIDLSQLGGDSGGS
SGGSCLSYETEILTVEYGLLPIGKIVEKRIECTVYSVDNNGNIYTQPVAQWHDRGEQEVFEYCL
EDGSLIRATKDHKFMTVDGQMLPIDEIFERELDLMRVDNLPNSGGSKRrADGSEFEPKKKRKV
KEY:
NLS (SEQ ID NO: 124, 125)
CAS9 (SEQ ID NO: 445)
LINKER (SEQ ID NO: 446)
NPUN INTEIN (SEQ ID NO: 447)
S. PYOGENES PE, SPLIT AT LINKER, C TERMINAL PORTION
STRUCTURE: [C INTEIN]-[C EXTEIN]
(SEQ ID NO: 450)
MKRTADGSEFESPKKKRKVIKIATRKYLGKQNVYDIGVERDHNFALKNGFIASNCFNSGSETPGTS
ESATPESSGGSSGGSSTLNIEDEYRLHETSKEPDVSLGSTWLSDFPQAWAETGGMGLAVRQAPLIIP
LKATSTPVSIKQYPMSQEARLGIKPHIQRLLDQGILVPCQSPWNTPLLPVKKPGTNDYRPVQDLREV
NKRVEDIHPTVPNPYNLLSGLPPSHQWYTVLDLKDAFFCLRLHPTSQPLFAFEWRDPEMGISGQLT
WTRLPQGFKNSPTLFDEALHRDLADFRIQHPDLILLQYVDDLLLAATSELDCQQGTRALLQTLGNL
GYRASAKKAQICQKQVKYLGYLLKEGQRWLTEARKETVMGQPTPKTPRQLREFLGTAGFCRLWIPG
FAEMAAPLYPLTKTGTLFNWGPDQQKAYQEIKQALLTAPALGLPDLTKPFELFVDEKQGYAKGVLTQ
KLGPWRRPVAYLSKKLDPVAAGWPPCLRMVAAIAVLTKDAGKLTMGQPLVILAPHAVEALVKQPPDR
WLSNARMTHYQALLLDTDRVQFGPWALNPATLLPLPEEGLQHNCLDILAEAHGTRPDLTDQPLPD
ADHTWYTDGSSLLQEGQRKAGAAVFPETEVIWAKALPAGTSAQRAELIALTQALKMAEGKKLNVYTD
SRYAFATAHIHGEIYRRRGLLTSEGKEIKNKDEILALLKALFLPKRLSIIHCPGHQKGHSAEARGNRMA
DQAARKAAITETPDTSTLLIENSSPSGGSKRYADGSEFEPKKKRKV
KEY:
NLS (SEQ ID NO: 124, 125)
LINKER 1 (SEQ ID NO: 453)
LINKER 2 (SEQ ID NO: 174)
NPUC INTEIN (SEQ ID NO: 452)
RT (SEQ ID NO: 454)
S. AUREUS PE, SPLIT BETWEEN RESIDUES 740/741, N TERMINAL PORTION
STRUCTURE: [N EXTEIN]-[N INTEIN]
(SEQ ID NO: 458)
MKRTADGSEFESPKKKRKVGKRNYILGLAIGITSVGYGIIDYETRDVIDAGVRLFKEANVEN
NEGRRSKRGARRLKRRRRHRIQRVKKLLFDYNLLTDHSELSGINPYEARVKGLSQKLSEE
EFSAALLHLAKRRGVHNVNEVEEDTGNELSTKEQISRNSKALEEKYVAELQLERLKKDG
EVRGSINRFKTSDYVKEAKQLLKVQKAYHQLDQSFIDTYIDLLETRRTYYEGPGEGSPFG
WKDIKEWYEMLMGHCTYFPEELRSVKYAYNADLYNALNDLNNLVITRDENEKLEYYEK
FQIIENVFKQKKKPTLKQIAKEILVNEEDIKGYRVTSTGKPEFTNLKVYHDIKDITARKEII
ENAELLDQIAKILTIYQSSEDIQEELTNLNSELTQEEIEQISNLKGYTGTHNLSLKAINLILD
ELWHTNDNQIAIFNRLKLVPKKVDLSQQKEIPTTLVDDFILSPVVKRSFIQSIKVINAIIKKY
GLPNDIIIELAREKNSKDAQKMINEMQKRNRQTNERIEEIIRTTGKENAKYLIEKIKLHDM
QEGKCLYSLEAIPLEDLLNNPFNYEVDHIIPRSVSFDNSFNNKVLVKQEENSKKGNRTPFQ
YLSSSDSKISYETFKKHILNLAKGKGRISKTKKEYLLEERDINRFSVQKDFINRNLVDTRYA
TRGLMNLLRSYFRVNNLDVKVKSINGGFTSFLRRKWKFKKERNKGYKHHAEDALIIANA
DFIFKEWKKLDKAKKVMENQMFEEKQAECLSYETEILTVEYGLLPIGKIVEKRIECTVYSVD
NNGNIYTQPVAQWHDRGEQEVFEYCLEDGSLIRATKDHKFMTVDGQMLPIDEIFERELDLMRV
DNLPNSGGSKRTADGSEFEPKKKRKV
KEY:
NLS (SEQ ID NO: 124, 125)
CAS9 (SEQ ID NO: 460)
LINKER (SEQ ID NO: 174)
NPUN INTEIN (SEQ ID NO: 462)
S. AUREUS PE, SPLIT BETWEEN RESIDUES 740/741, C TERMINAL PORTION
STRUCTURE: [C INTEIN]-[C EXTEIN]
(SEQ ID NO: 465)
MKRTADGSEFESPKKKRKVIKIATRKYLGKQNVYDIGVERDHNFALKNGFIASNCFNEIETEQEY
KEIFITPHQIKHIKDFKDYKYSHRVDKKPNRKLINDTLYSTRKDDKGNTLIVNNLNGLYDK
DNDKLKKLINKSPEKLLMYHHDPQTYQKLKLIMEQYGDEKNPLYKYYEETGNYLTKYS
KKDNGPVIKKIKYYGNKLNAHLDITDDYPNSRNKVVKLSLKPYRFDVYLDNGVYKFVTV
KNLDVIKKENYYEVNSKCYEEAKKLKKISNQAEFIASFYKNDLIKINGELYRVIGVNNDLL
NRIEVNMIDITYREYLENMNDKRPPHIIKTIASKTQSIKKYSTDILGNLYEVKSKKHPQIIK
KGSGGSSGGSSGSETPGTSESATPFSSGGSSGGSSTLNIEDEYRLHETSKEPDVSLGSTWLSDFP
QAWAETGGMGLAVRQAPLIIPLKATSTPVSIKQYPMSQEARLGIKPHIQRLLDQGILVPCQSPWNTPL
LPVKKPGTNDYRPVQDLREVNKRVEDIHPTVPNPYNLLSGLPPSHQWYTVLDLKDAFFCLRLHPTS
QPLFAFEWRDPEMGISGQLTWTRLPQGFKNSPTLFDEALHRDLADFRIQHPDLILLQYVDDLLLAAT
SELDCQQGTRALLQTLGNLGYRASAKKAQICQKQVKYLGYLLKEGQRWLTEARKETVMGQPTPKTP
RQLREFLGTAGFCRLWIPGFAEMAAPLYPLTKTGTLFNWGPDQQKAYQEIKQALLTAPALGLPDLTK
PFELFVDEKQGYAKGVLTQKLGPWRRPVAYLSKKLDPVAAGWPPCLRMVAAIAVLTKDAGKLTMGQ
PLVILAPHAVEALVKQPPDRWLSNARMTHYQALLLDTDRVQFGPWALNPATLLPLPEEGLQHNCLD
ILAEAHGTRPDLTDQPLPDADHTWYTDGSSLLQEGQRKAGAAVTTETEVIWAKALPAGTSAQRAELI
ALTQALKMAEGKKLNVYTDSRYAFATAHIHGEIYRRRGLLTSEGKEIKNKDEILALLKALFLPKRLSIIH
CPGHQKGHSAEARGNRMADQAARKAAITETPDTSTLLIENSSPSGGSKRTADGSEFEPKKKRKV
KEY:
NLS (SEQ ID NO: 124, 125)
CAS9 (SEQ ID NO: 467)
LINKER 1 (SEQ ID NO: 127)
LINKER 2 (SEQ ID NO: 174)
NPUC INTEIN (SEQ ID NO: 452)
RT (SEQ ID NO: 471)

[0896] In various embodiments, using SpCas9 nickase (SEQ ID NO: 18, 1368 amino acids) as an example, the split can between between any two amino acids between 1 and 1368. Preferred splits, however, will be located between the central region of the protein, e.g., from amino acids 50-1250, or from 100-1200, or from 150-1150, or from 200-1100, or from 250-1050, or from 300-1000, or from 350-950, or from 400-900, or from 450-850, or from 500-800, or from 550-750, or from 600-700 of SEQ ID NO: 18. In specific exemplary embodiments, the split site may be between 740/741, or 801/802, or 1010/1011, or 1041/1042. In other embodiments the split site may be between 1/2, 2/3, 3/4, 4/5, 5/6, 6/7, 7/8, 8/9, 9/10, 10/11, 12/13, 14/15, 15/16, 17/18, 19/20, 20/21, 21/22, 22/23, 23/24, 24/25, 25/26, 26/27, 27/28, 28/29, 29/30, 30/31, 31/32, 32/33, 33/34, 34/35, 35/36, 36/37, 38/39, 39/40, 41/42, 42/43, 43/44, 44/45, 45/46, 46/47, 47/48, 48/49, 49/50, 51/52, 52/53, 53/54, 54/55, 55/56, 56/57, 57/58, 58/59, 59/60, 61/62, 62/63, 63/64, 64/65, 65/66, 66/67, 67/68, 68/69, 69/70, 71/72, 72/73, 73/74, 74/75, 75/76, 76/77, 77/78, 78/79, 79/80, 81/82, 82/83, 83/84, 84/85, 85/86, 86/87, 87/88, 88/89, 89/90, or between any two pairs of adjacent residues between 90-100, 100-150, 150-200, 200-250, 250-300, 300-350, 350-400, 450-500, 500-550, 550-600, 600-650, 650-700, 700-750, 750-800, 800-850, 850-900, 900-950, 950-1000, 1000-1050, 1050-1100, 1100-1150, 1150-1200, 1200-1250, 1250-1300, 1300-1350, and 1350-1368, relative to SpCas9 of SEQ ID NO: 18, at between any two corresponding residues in an amino acid sequence having at least 80%, 85%, 90%, 95%, 98%, 99%, or 99.9% sequence identity with SEQ ID NO: 18, or between any two corresponding residues in a variant or equivalent of SpCas9 of any of amino acid sequences SEQ ID NOs. 19-88, or an amino acid sequence having at least 80%, 85%, 90%, 95%, 98%, 99%, or 99.9% sequence identity with any of SEQ ID NOs: 19-88.

[0897] In various embodiments, the split intein sequences can be engineered by from the following intein sequences.

| NAME | SEQUENCE OF LIGAND-DEPENDENT INTEIN |
|---|---|
| 2-4 INTEIN: | CLAEGTRIFDPVTGTTHRIEDVVDGRKPIHVVAAAKDGTLLARPVVSWFD |
| | QGTRDVIGLRIAGGAIVWATPDHKVLTEYGWRAAGELRKGDRVAGPGGS |
| | GNSLALSLTADQMVSALLDAEPPILYSEYDPTSPFSEASMMGLLTNLADRE |
| | LVHMINWAKRVPGFVDLTLHDQAHLLECAWLEILMIGLVWRSMEHPGKL |
| | LFAPNLLLDRNQGKCVEGMVEIFDMLLATSSRFRMMNLQGEEFVCLKSII |
| | LLNSGVYTFLSSTLKSLEEKDHIHRALDKITDTLIHLMAKAGLTLQQQHQR |
| | LAQLLLILSHIRHMSNKGMEHLYSMKYKNVVPLYDLLLEMLDAHRLHAG |
| | GSGASRVQAFADALDDKFLHDMLAEELRYSVIREVLPTRRARTFDLEVEE |
| | LHTLVAEGVVVHNC (SEQ ID NO: 472) |
| 3-2 INTEIN | CLAEGTRIFDPVTGTTHRIEDVVDGRKPIHVVAVAKDGTLLARPVVSWFD |
| | QGTRDVIGLRIAGGAIVWATPDHKVLTEYGWRAAGELRKGDRVAGPGGS |
| | GNSLALSLTADQMVSALLDAEPPILYSEYDPTSPFSEASMMGLLTNLADRE |
| | LVHMINWAKRVPGFVDLTLHDQAHLLECAWLEILMIGLVWRSMEHPGKL |
| | LFAPNLLLDRNQGKCVEGMVEIFDMLLATSSRFRMMNLQGEEFVCLKSII |
| | LLNSGVYTFLSSTLKSLEEKDHIHRALDKITDTLIHLMAKAGLTLQQQHQR |
| | LAQLLLILSHIRHMSNKGMEHLYSMKYTNVVPLYDLLLEMLDAHRLHAG |
| | GSGASRVQAFADALDDKFLHDMLAEELRYSVIREVLPTRRARTFDLEVEE |
| | LHTLVAEGVVVHNC (SEQ ID NO: 473) |
| 30R3-1 INTEIN | CLAEGTRIFDPVTGTTHRIEDVVDGRKPIHVVAAAKDGTLLARPVVSWFD |
| | QGTRDVIGLRIAGGATVWATPDHKVLTEYGWRAAGELRKGDRVAGPGGS |
| | GNSLALSLTADQMVSALLDAEPPIPYSEYDPTSPFSEASMMGLLTNLADRE |
| | LVHMINWAKRVPGFVDLTLHDQAHLLECAWLEILMIGLVWRSMEHPGKL |
| | LFAPNLLLDRNQGKCVEGMVEIFDMLLATSSRFRMMNLQGEEFVCLKSII |
| | LLNSGVYTFLSSTLKSLEEKDHIHRALDKITDTLIHLMAKAGLTLQQQHQR |
| | LAQLLLILSHIRHMSNKGMEHLYSMKYKNVVPLYDLLLEMLDAHRLHAG |
| | GSGASRVQAFADALDDKFLHDMLAEGLRYSVIREVLPTRRARTFDLEVEE |
| | LHTLVAEGVVVHNC (SEQ ID NO: 474) |
| 30R3-2 INTEIN | CLAEGTRIFDPVTGTTHRIEDVVDGRKPIHVVAAAKDGTLLARPVVSWFD |
| | QGTRDVIGLRIAGGATVWATPDHKVLTEYGWRAAGELRKGDRVAGPGGS |
| | GNSLALSLTADQMVSALLDAEPPILYSEYDPTSPFSEASMMGLLTNLADRE |
| | LVHMINWAKRVPGFVDLTLHDQAHLLECAWLEILMIGLVWRSMEHPGKL |
| | LFAPNLLLDRNQGKCVEGMVEIFDMLLATSSRFRMMNLQGEEFVCLKSII |
| | LLNSGVYTFLSSTLKSLEEKDHIHRALDKITDTLIHLMAKAGLTLQQQHQR |
| | LAQLLLILSHIRHMSNKGMEHLYSMKYKNVVPLYDLLLEMLDAHRLHAG |
| | GSGASRVQAFADALDDKFLHDMLAEELRYSVIREVLPTRRARTFDLEVEE |
| | LHTLVAEGVVVHNC (SEQ ID NO: 475) |
| 30R3-3 INTEIN | CLAEGTRIFDPVTGTTHRIEDVVDGRKPIHVVAAAKDGTLLARPVVSWFD |
| | QGTRDVIGLRIAGGATVWATPDHKVLTEYGWRAAGELRKGDRVAGPGGS |
| | GNSLALSLTADQMVSALLDAEPPIPYSEYDPTSPFSEASMMGLLTNLADRE |
| | LVHMINWAKRVPGFVDLTLHDQAHLLECAWLEILMIGLVWRSMEHPGKL |
| | LFAPNLLLDRNQGKCVEGMVEIFDMLLATSSRFRMMNLQGEEFVCLKSII |
| | LLNSGVYTFLSSTLKSLEEKDHIHRALDKITDTLIHLMAKAGLTLQQQHQR |
| | LAQLLLILSHIRHMSNKGMEHLYSMKYKNVVPLYDLLLEMLDAHRLHAG |
| | GSGASRVQAFADALDDKFLHDMLAEELRYSVIREVLPTRRARTFDLEVEE |
| | LHTLVAEGVVVHNC (SEQ ID NO: 476) |
| 37R3-1 INTEIN | CLAEGTRIFDPVTGTTHRIEDVVDGRKPIHVVAAAKDGTLLARPVVSWFD |
| | QGTRDVIGLRIAGGATVWATPDHKVLTEYGWRAAGELRKGDRVAGPGGS |
| | GNSLALSLTADQMVSALLDAEPPILYSEYNPTSPFSEASMMGLLTNLADRE |
| | LVHMINWAKRVPGFVDLTLHDQAHLLERAWLEILMIGLVWRSMEHPGKL |
| | LFAPNLLLDRNQGKCVEGMVEIFDMLLATSSRFRMMNLQGEEFVCLKSII |
| | LLNSGVYTFLSSTLKSLEEKDHIHRALDKITDTLIHLMAKAGLTLQQQHQR |
| | LAQLLLILSHIRHMSNKGMEHLYSMKYKNVVPLYDLLLEMLDAHRLHAG |
| | GSGASRVQAFADALDDKFLHDMLAEGLRYSVIREVLPTRRARTFDLEVEE |
| | LHTLVAEGVVVHNC ((SEQ ID NO: 477) |
| 37R3-2 INTEIN | CLAEGTRIFDPVTGTTHRIEDVVDGRKPIHVVAAAKDGTLLARPVVSWFD |
| | QGTRDVIGLRIAGGAIVWATPDHKVLTEYGWRAAGELRKGDRVAGPGGS |
| | GNSLALSLTADQMVSALLDAEPPILYSEYDPTSPFSEASMMGLLTNLADRE |
| | LVHMINWAKRVPGFVDLTLHDQAHLLERAWLEILMIGLVWRSMEHPGKL |
| | LFAPNLLLDRNQGKCVEGMVEIFDMLLATSSRFRMMNLQGEEFVCLKSII |
| | LLNSGVYTFLSSTLKSLEEKDHIHRALDKITDTLIHLMAKAGLTLQQQHQR |
| | LAQLLLILSHIRHMSNKGMEHLYSMKYKNVVPLYDLLLEMLDAHRLHAG |
| | GSGASRVQAFADALDDKFLHDMLAEGLRYSVIREVLPTRRARTFDLEVEE |
| | LHTLVAEGVVVHNC (SEQ ID NO: 478) |
| 37R3-3 INTEIN | CLAEGTRIFDPVTGTTHRIEDVVDGRKPIHVVAVAKDGTLLARPVVSWFD |
| | QGTRDVIGLRIAGGATVWATPDHKVLTEYGWRAAGELRKGDRVAGPGGS |
| | GNSLALSLTADQMVSALLDAEPPILYSEYDPTSPFSEASMMGLLTNLADRE |
| | LVHMINWAKRVPGFVDLTLHDQAHLLERAWLEILMIGLVWRSMEHPGKL |
| | LFAPNLLLDRNQGKCVEGMVEIFDMLLATSSRFRMMNLQGEEFVCLKSII |
| | LLNSGVYTFLSSTLKSLEEKDHIHRALDKITDTLIHLMAKAGLTLQQQHQR |
| | LAQLLLILSHIRHMSNKGMEHLYSMKYKNVVPLYDLLLEMLDAHRLHAG |
| | GSGASRVQAFADALDDKFLHDMLAEELRYSVIREVLPTRRARTFDLEVEE |
| | LHTLVAEGVVVHNC (SEQ ID NO: 479) |

[0898] In various other embodiments, the split intein sequences can be used as follows:

| INTEIN-N | INTEIN-C |
|---|---|
| NPU-N | NPU-C |
| CLSYETEILTVEYGLLPIGKIVEKRIEC | IKIATRKYLGKQNVYDIGVE |
| TVYSVDNNGNIYTQPVAQWHDRGEQEVF | RDHNFALKNGFIASN |
| EYCLEDGSLIRATKDHKFMTVDGQMLPI | (SEQ ID NO: 452) |
| DEIFERELDLMRVDNLPNSGGS | |
| (SEQ ID NO: 447) | |

[0899] In various embodiments, the split inteins can be used to separately deliver separate portions of a complete PE fusion protein to a cell, which upon expression in a cell, become reconstituted as a complete PE fusion protein through the trans splicing.

[0900] In some embodiments, the disclosure provides a method of delivering a PE fusion protein to a cell, comprising:
[0901] (a) constructing a first expression vector encoding an N-terminal fragment of the PE fusion protein fused to a first split intein sequence;
[0902] (b) constructing a second expression vector encoding a C-terminal fragment of the PE fusion protein fused to a second split intein sequence;
[0903] (c) delivering the first and second expression vectors to a cell,
   wherein the N-terminal and C-terminal fragment are reconstituted as the PE fusion protein in the cell as a result of trans splicing activity causing self-excision of the first and second split intein sequences.

[0904] The split site in some embodiments can be anywhere in the prime editor fusion, including the napDNAbp domain, the linker, or the reverse transcriptase domain

[0905] In other embodiments, the split site is in the napDNAbp domain

[0906] In still other embodiments, the split site is in the reverse transcriptase or polymerase domain

[0907] In yet other embodiments, the split site is in the linker.

[0908] In various embodiments, the present disclosure provides multi-flap prime editors comprising a napDNAbp (e.g., a Cas9 domain) and a reverse transcriptase wherein one or both of the napDNAbp and/or the reverse transcriptase comprise an intein, for example, a ligand-dependent intein. Typically the intein is a ligand-dependent intein which exhibits no or minimal protein splicing activity in the absence of ligand (e g , small molecules such as 4-hydroxytamoxifen, peptides, proteins, polynucleotides, amino acids, and nucleotides). Ligand-dependent inteins are known, and include those described in U.S. patent application, U.S. Ser. No. 14/004,280, published as U.S. 2014/0065711 A1, the entire contents of which are incorporated herein by reference. In addition, use of split-Cas9 architecture In some embodiments, the intein comprises an amino acid sequence selected from the group consisting of SEQ ID NOs: 8-15, 447, 452, 462, and 472-479.

[0909] In various embodiments, the napDNAbp domains are smaller-sized napDNAbp domains as compared to the canonical SpCas9 domain of SEQ ID NO: 18.

[0910] The canonical SpCas9 protein is 1368 amino acids in length and has a predicted molecular weight of 158 kilodaltons. The term “small-sized Cas9 variant”, as used herein, refers to any Cas9 variant—naturally occurring, engineered, or otherwise—that is less than at least 1300 amino acids, or at least less than 1290 amino acids, or than less than 1280 amino acids, or less than 1270 amino acid, or less than 1260 amino acid, or less than 1250 amino acids, or less than 1240 amino acids, or less than 1230 amino acids, or less than 1220 amino acids, or less than 1210 amino acids, or less than 1200 amino acids, or less than 1190 amino acids, or less than 1180 amino acids, or less than 1170 amino acids, or less than 1160 amino acids, or less than 1150 amino acids, or less than 1140 amino acids, or less than 1130 amino acids, or less than 1120 amino acids, or less than 1110 amino acids, or less than 1100 amino acids, or less than 1050 amino acids, or less than 1000 amino acids, or less than 950 amino acids, or less than 900 amino acids, or less than 850 amino acids, or less than 800 amino acids, or less than 750 amino acids, or less than 700 amino acids, or less than 650 amino acids, or less than 600 amino acids, or less than 550 amino acids, or less than 500 amino acids, but at least larger than about 400 amino acids and retaining the required functions of the Cas9 protein.

[0911] In one embodiment, as depicted in Example 20, the specification embraces the following split-intein PE contructs, which are split between residues 1024 and 1025 of the canonical SpCas9 (SEQ ID NO: 18) (or which may be referred to as residues 1023 and 1024, respectively, relative to a Met-minus SEQ ID NO: 18).

[0912] First, the amino acid sequence of SEQ ID NO: 18 is shown as follows, indicating the location of the split site between 1024 (“K”) and 1025 (“S”) residues:

| Description | Sequence | SEQ ID NO: |
|---|---|---|
| SpCas9 | MDKKYSIGLDIGTNSVGWAVITDEYKVPSKKFKVLGNTDR | SEQ ID NO: 18, |
| Streptococcus | HSIKKNLIGALLFDSGETAEATRLKRTARRRYTRRKNRICYL | indicated with |
| pyogenes | QEIFSNEMAKVDDSFFHRLEESFLVEEDKKHERHPIFGNIVD | split site |
| M1 | EVAYHEKYPTIYHLRKKLVDSTDKADLRLIYLALAHMIKFR | 1024/1025 in |
| SwissProt | GHFLIEGDLNPDNSDVDKLFIQLVQTYNQLFEENPINASGVD | bold |
| Accession | AKAILSARLSKSRRLENLIAQLPGEKKNGLFGNLIALSLGLTP | The M at |
| No. Q99ZW2 | NFKSNFDLAEDAKLQLSKDTYDDDLDNLLAQIGDQYADLF | position 1 is not |
| Wild type | LAAKNLSDAILLSDILRVNTEITKAPLSASMIKRYDEHHQDL | necessarily |
| | TLLKALVRQQLPEKYKEIFFDQSKNGYAGYIDGGASQEEFY | present in the |
| | KFIKPILEKMDGTEELLVKLNREDLLRKQRTFDNGSIPHQIHL | PE fusion |
| | GELHAILRRQEDFYPFLKDNREKIEKILTFRIPYYVGPLARGN | protein in |
| | SRFAWMTRKSEETITPWNFEEVVDKGASAQSFIERMTNFDK | certain |
| | NLPNEKVLPKHSLLYEYFTVYNELTKVKYVTEGMRKPAFLS | embodiments. |
| | GEQKKAIVDLLFKTNRKVTVKQLKEDYFKKIECFDSVEISGV | Thus, the |
| | EDRFNASLGTYHDLLKIIKDKDFLDNEENEDILEDIVLTLTLF | numbering of |
| | EDREMIEERLKTYAHLFDDKVMKQLKRRRYTGWGRLSRKL | the split site is |
| | INGIRDKQSGKTILDFLKSDGFANRNFMQLIHDDSLTFKEDIQ | 1023/1024 in |
| | KAQVSGQGDSLHEHIANLAGSPAIKKGILQTVKVVDELVKV | the case that the |
| | MGRHKPENIVIEMARENQTTQKGQKNSRERMKRIEEGIKEL | amino acid |
| | GSQILKEHPVENTQLQNEKLYLYYLQNGRDMYVDQELDIN | sequence |
| | RLSDYDVDHIVPQSFLKDDSIDNKVLTRSDKNRGKSDNVPS | excludes Met at |
| | EEVVKKMKNYWRQLLNAKLITQRKFDNLTKAERGGLSELD | position 1. |
| | KAGFIKRQLVETRQITKHVAQILDSRMNTKYDENDKLIREV | |
| | KVITLKSKLVSDFRKDFQFYKVREINNYHHAHDAYLNAVV | |
| | GTALIKKYPKLESEFVYGDYKVYDVRKMIAKSEQEIGKATA | |
| | KYFFYSNIMNFFKTEITLANGEIRKRPLIETNGETGEIVWDKG | |
| | RDFATVRKVLSMPQVNIVKKTEVQTGGFSKESILPKRNSDK | |
| | LIARKKDWDPKKYGGFDSPTVAYSVLVVAKVEKGKSKKLK | |
| | SVKELLGITIMERSSFEKNPIDFLEAKGYKEVKKDLIIKLPKY | |
| | SLFELENGRKRMLASAGELQKGNELALPSKYVNFLYLASHY | |
| | EKLKGSPEDNEQKQLFVEQHKHYLDEIIEQISEFSKRVILADA | |
| | NLDKVLSAYNKHRDKPIREQAENIIHLFTLTNLGAPAAFKYF | |
| | DTTIDRKRYTSTKEVLDATLIHQSITGLYETRIDLSQLGGD | |

[0913] In this configuration, the amino acid sequence of N-terminal half (amino acids 1-1024) is as follows:

(SEQ ID NO: 3877)
MDKKYSIGLDIGTNSVGWAVITDEYKVPSKKFKVLGNTDRHSIKKNLIGA
LLFDSGETAEATRLKRTARRRYTRRKNRICYLQEIFSNEMAKVDDSFFHR
LEESFLVEEDKKHERHPIFGNIVDEVAYHEKYPTIYHLRKKLVDSTDKAD
LRLIYLALAHMIKFRGHFLIEGDLNPDNSDVDKLFIQLVQTYNQLFEENP
INASGVDAKAILSARLSKSRRLENLIAQLPGEKKNGLFGNLIALSLGLTP
NFKSNFDLAEDAKLQLSKDTYDDDLDNLLAQIGDQYADLFLAAKNLSDAI
LLSDILRVNTEITKAPLSASMIKRYDEHHQDLTLLKALVRQQLPEKYKEI
FFDQSKNGYAGYIDGGASQEEFYKFIKPILEKMDGTEELLVKLNREDLLR
KQRTFDNGSIPHQIHLGELHAILRRQEDFYPFLKDNREKIEKILTFRIPY
YVGPLARGNSRFAWMTRKSEETITPWNFEEVVDKGASAQSFIERMTNFDK
NLPNEKVLPKHSLLYEYFTVYNELTKVKYVTEGMRKPAFLSGEQKKAIVD
LLFKTNRKVTVKQLKEDYFKKIECFDSVEISGVEDRFNASLGTYHDLLKI
IKDKDFLDNEENEDILEDIVLTLTLFEDREMIEERLKTYAHLFDDKVMKQ
LKRRRYTGWGRLSRKLINGIRDKQSGKTILDFLKSDGFANRNFMQLIHDD
SLTFKEDIQKAQVSGQGDSLHEHIANLAGSPAIKKGILQTVKVVDELVKV
MGRHKPENIVIEMARENQTTQKGQKNSRERMKRIEEGIKELGSQILKEHP
VENTQLQNEKLYLYYLQNGRDMYVDQELDINRLSDYDVDAIVPQSFLKDD
SIDNKVLTRSDKNRGKSDNVPSEEVVKKMKNYWRQLLNAKLITQRKFDNL
TKAERGGLSELDKAGFIKRQLVETRQITKHVAQILDSRMNTKYDENDKLI
REVKVITLKSKLVSDFRKDFQFYKVREINNYHHAHDAYLNAVVGTALIKK
YPKLESEFVYGDYKVYDVRKMIAK.

[0914] In this configuration, the amino acid sequence of N-terminal half (amino acids 1-1023) (where the protein is Met-minus at position 1) is as follows:

(SEQ ID NO: 3878)
DKKYSIGLDIGTNSVGWAVITDEYKVPSKKFKVLGNTDRHSIKKNLIGAL
LFDSGETAEATRLKRTARRRYTRRKNRICYLQEIFSNEMAKVDDSFFHRL
EESFLVEEDKKHERHPIFGNIVDEVAYHEKYPTIYHLRKKLVDSTDKADL
RLIYLALAHMIKFRGHFLIEGDLNPDNSDVDKLFIQLVQTYNQLFEENPI
NASGVDAKAILSARLSKSRRLENLIAQLPGEKKNGLFGNLIALSLGLTPN
FKSNFDLAEDAKLQLSKDTYDDDLDNLLAQIGDQYADLFLAAKNLSDAIL
LSDILRVNTEITKAPLSASMIKRYDEHHQDLTLLKALVRQQLPEKYKEIF
FDQSKNGYAGYIDGGASQEEFYKFIKPILEKMDGTEELLVKLNREDLLRK
QRTFDNGSIPHQIHLGELHAILRRQEDFYPFLKDNREKIEKILTFRIPYY
VGPLARGNSRFAWMTRKSEETITPWNFEEVVDKGASAQSFIERMTNFDKN
LPNEKVLPKHSLLYEYFTVYNELTKVKYVTEGMRKPAFLSGEQKKAIVDL
LFKTNRKVTVKQLKEDYFKKIECFDSVEISGVEDRFNASLGTYHDLLKII
KDKDFLDNEENEDILEDIVLTLTLFEDREMIEERLKTYAHLFDDKVMKQL
KRRRYTGWGRLSRKLINGIRDKQSGKTILDFLKSDGFANRNFMQLIHDDS
LTFKEDIQKAQVSGQGDSLHEHIANLAGSPAIKKGILQTVKVVDELVKVM
GRHKPENIVIEMARENQTTQKGQKNSRERMKRIEEGIKELGSQILKEHPV
ENTQLQNEKLYLYYLQNGRDMYVDQELDINRLSDYDVDAIVPQSFLKDDS
IDNKVLTRSDKNRGKSDNVPSEEVVKKMKNYWRQLLNAKLITQRKFDNLT
KAERGGLSELDKAGFIKRQLVETRQITKHVAQILDSRMNTKYDENDKLIR
EVKVITLKSKLVSDFRKDFQFYKVREINNYHHAHDAYLNAVVGTALIKKY
PKLESEFVYGDYKVYDVRKMIAK.

[0915] In this configuration, the amino acid sequence of C-terminal half (amino acids 1024-1368 (or counted as amino acids 1023-1367 in a Met-minus Cas9) is as follows:

(SEQ ID NO: 3879)
SEQEIGKATAKYFFYSNIMNFFKTEITLANGEIRKRPLIETNGETGEIVW
DKGRDFATVRKVLSMPQVNIVKKTEVQTGGFSKESILPKRNSDKLIARKK
DWDPKKYGGFDSPTVAYSVLVVAKVEKGKSKKLKSVKELLGITIMERSSF
EKNPIDFLEAKGYKEVKKDLIIKLPKYSLFELENGRKRMLASAGELQKGN
ELALPSKYVNFLYLASHYEKLKGSPEDNEQKQLFVEQHKHYLDEIIEQIS
EFSKRVILADANLDKVLSAYNKHRDKPIREQAENIIHLFTLTNLGAPAAF
KYFDTTIDRKRYTSTKEVLDATLIHQSITGLYETRIDLSQLGGD.

[0916] As shown in Example 20, the PE2 (which is based on SpCas9 of SEQ ID NO: 18) construct was split at position 1023/1024 (relative to a Met-minus SEQ ID NO: 18) into two separate constructs, as follows:

SpPE2 split at 1023/1024 N terminal half
(SEQ ID NO: 3875)
MKRTADGSEFESPKKKRKVDKKYSIGLDIGTNSVGWAVITDEYKVPSKKFKVLGNTDRH
SIKKNLIGALLFDSGETAEATRLKRTARRRYTRRKNRICYLQEIFSNEMAKVDDSFFHRLEESFLV
EEDKKHERHPIFGNIVDEVAYHEKYPTIYHLRKKLVDSTDKADLRLIYLALAHMIKFRGHFLIEG
DLNPDNSDVDKLFIQLVQTYNQLFEENPINASGVDAKAILSARLSKSRRLENLIAQLPGEKKNGLF
GNLIALSLGLTPNFKSNFDLAEDAKLQLSKDTYDDDLDNLLAQIGDQYADLFLAAKNLSDAILLS
DILRVNTEITKAPLSASMIKRYDEHHQDLTLLKALVRQQLPEKYKEIFFDQSKNGYAGYIDGGAS
QEEFYKFIKPILEKMDGTEELLVKLNREDLLRKQRTFDNGSIPHQIHLGELHAILRRQEDFYPFLK
DNREKIEKILTFRIPYYVGPLARGNSRFAWMTRKSEETITPWNFEEVVDKGASAQSFIERMTNFD
KNLPNEKVLPKHSLLYEYFTVYNELTKVKYVTEGMRKPAFLSGEQKKAIVDLLFKTNRKVTVK
QLKEDYFKKIECFDSVEISGVEDRFNASLGTYHDLLKIIKDKDFLDNEENEDILEDIVLTLTLFEDR
EMIEERLKTYAHLFDDKVMKQLKRRRYTGWGRLSRKLINGIRDKQSGKTILDFLKSDGFANRNF
MQLIHDDSLTFKEDIQKAQVSGQGDSLHEHIANLAGSPAIKKGILQTVKVVDELVKVMGRHKPE
NIVIEMARENQTTQKGQKNSRERMKRIEEGIKELGSQILKEHPVENTQLQNEKLYLYYLQNGRD
MYVDQELDINRLSDYDVDAIVPQSFLKDDSIDNKVLTRSDKNRGKSDNVPSEEVVKKMKNYWR
QLLNAKLITQRKFDNLTKAERGGLSELDKAGFIKRQLVETRQITKHVAQILDSRMNTKYDENDK
LIREVKVITLKSKLVSDFRKDFQFYKVREINNYHHAHDAYLNAVVGTALIKKYPKLESEFVYGD

[chemical structure]

[chemical structure]

[chemical structure]

SpPE2 split at 1023/1024 C terminal half
(SEQ ID NO: 3876)

[chemical structure]

FYSNIMNFFKTEITLANGEIRKRPLIETNGETGEIVWDKGRDFATVRKVLSMPQVNIVKKTEVQT
GGFSKESILPKRNSDKLIARKKDWDPKKYGGFDSPTVAYSVLVVAKVEKGKSKKLKSVKELLGI
TIMERSSFEKNPIDFLEAKGYKEVKKDLIIKLPKYSLFELENGRKRMLASAGELQKGNELALPSKY
VNFLYLASHYEKLKGSPEDNEQKQLFVEQHKHYLDEIIEQISEFSKRVILADANLDKVLSAYNKH
RDKPIREQAENIIHLFTLTNLGAPAAFKYFDTTIDRKRYTSTKEVLDATLIHQSITGLYETRIDLSQL

[chemical structure]

DFPQAWAETGGMGLAVRQAPLIIPLKATSTPVSIKQYPMSQEARLGIKPHIQRLLDQGILVP
CQSPWNTPLLPVKKPGTNDYRPVQDLREVNKRVEDIHPTVPNPYNLLSGLPPSHQWYTVLD
LKDAFFCLRLHPTSQPLFAFEWRDPEMGISGQLTWTRLPQGFKNSPTLFNEALHRDLADFR
IQHPDLILLQYVDDLLLAATSELDCQQGTRALLQTLGNLGYRASAKKAQICQKQVKYLGY
LLKEGQRWLTEARKETVMGQPTPKTPRQLREFLGKAGFCRLFIPGFAEMAAPLYPLTKPG
TLFNWGPDQQKAYQEIKQALLTAPALGLPDLTKPFELFVDEKQGYAKGVLTQKLGPWRR
PVAYLSKKLDPVAAGWPPCLRMVAAIAVLTKDAGKLTMGQPLVILAPHAVEALVKQPPDR
WLSNARMTHYQALLLDTDRVQFGPVVALNPATLLPLPEEGLQHNCLDILAEAHGTRPDLT
DQPLPDADHTWYTDGSSLLQEGQRKAGAAVTTETEVIWAKALPAGTSAQRAELIALTQAL
KMAEGKKLNVYTDSRYAFATAHIHGEIYRRRGWLTSEGKEIKNKDEILALLKALFLPKRLS

[chemical structure]

KRK

[chemical structure]

[0917] The present disclosure also contemplates methods of delivering split-intein multi-flap prime editors to cells and/or treating cells with split-intein multi-flap prime editors.

[0918] In some embodiments, the disclosure provides a method of delivering a PE fusion protein to a cell, comprising:
[0919] (a) constructing a first expression vector encoding an N-terminal fragment of the PE fusion protein fused to a first split intein sequence;
[0920] (b) constructing a second expression vector encoding a C-terminal fragment of the PE fusion protein fused to a second split intein sequence;
[0921] (c) delivering the first and second expression vectors to a cell,
   wherein the N-terminal and C-terminal fragment are reconstituted as the PE fusion protein in the cell as a result of trans splicing activity causing self-excision of the first and second split intein sequences.

[0922] In certain embodiments, the N-terminal fragment of the PE fusion protein fused to a first split intein sequence is SEQ ID NO: 3875, or an amino acid sequence having at least 80%, at least 85%, at least 90%, at least 95%, at least 98%, or at least 99.9% sequence identity with SEQ ID NO: 3875.

[0923] In other embodiments, the C-terminal fragment of the PE fusion protein fused to a first split intein sequence is SEQ ID NO: 3876, or an amino acid sequence having at least 80%, at least 85%, at least 90%, at least 95%, at least 98%, or at least 99.9% sequence identity with SEQ ID NO: 3876.

[0924] In other embodiments, the disclosure provides a method of editing a target DNA sequence within a cell, comprising:
[0925] (a) constructing a first expression vector encoding an N-terminal fragment of the PE fusion protein fused to a first split intein sequence;
[0926] (b) constructing a second expression vector encoding a C-terminal fragment of the PE fusion protein fused to a second split intein sequence;
[0927] (c) delivering the first and second expression vectors to a cell,
   wherein the N-terminal and C-terminal fragment are reconstituted as the PE fusion protein in the cell as a result of trans splicing activity causing self-excision of the first and second split intein sequences.

[0928] In certain embodiments, the N-terminal fragment of the PE fusion protein fused to a first split intein sequence is SEQ ID NO: 3875, or an amino acid sequence having at least 80%, at least 85%, at least 90%, at least 95%, at least 98%, or at least 99.9% sequence identity with SEQ ID NO: 3875.

[0929] In other embodiments, the C-terminal fragment of the PE fusion protein fused to a first split intein sequence is SEQ ID NO: 3876, or an amino acid sequence having at least 80%, at least 85%, at least 90%, at least 95%, at least 98%, or at least 99.9% sequence identity with SEQ ID NO: 3876.

### Delivery of PE Ribonucleoprotein Complexes

[0930] In this aspect, the multi-flap prime editors may be delivered by non-viral delivery strategies involving delivery of a multi-flap prime editor complexed with PEgRNA (i.e., a PE ribonucleoprotein complex) by various methods, including electroporation and lipid nanoparticles. Methods of non-viral delivery of nucleic acids include lipofection, nucleofection, microinjection, biolistics, virosomes, liposomes, immunoliposomes, polycation or lipid:nucleic acid conjugates, naked DNA, artificial virions, and agent-enhanced uptake of DNA. Lipofection is described in e.g., U.S. Pat. Nos. 5,049,386, 4,946,787; and 4,897,355) and lipofection reagents are sold commercially (e.g., Transfectam™ and Lipofectin™)

[0931] Cationic and neutral lipids that are suitable for efficient receptor-recognition lipofection of polynucleotides include those of Feigner, WO 91/17424; WO 91/16024. Delivery can be to cells (e.g. in vitro or ex vivo administration) or target tissues (e.g. in vivo administration).

[0932] The preparation of lipid:nucleic acid complexes, including targeted liposomes such as immunolipid complexes, is well known to one of skill in the art (see, e.g., Crystal, Science 270:404-410 (1995); Blaese et al., Cancer Gene Ther. 2:291-297 (1995); Behr et al., Bioconjugate Chem. 5:382-389 (1994); Remy et al., Bioconjugate Chem. 5:647-654 (1994); Gao et al., Gene Therapy 2:710-722 (1995); Ahmad et al., Cancer Res. 52:4817-4820 (1992); U.S. Pat. Nos. 4,186,183, 4,217,344, 4,235,871, 4,261,975, 4,485,054, 4,501,728, 4,774,085, 4,837,028, and 4,946,787).

[0933] Additional reference may be made to the following references that discuss approaches for non-viral delivery of ribonucleoprotein complexes, each of which are incorporated herein by reference.

[0934] Chen, Sean, et al. “Highly efficient mouse genome editing by CRISPR ribonucleoprotein electroporation of zygotes.” Journal of Biological Chemistry (2016): jbc-M116. PubMed

[0935] Zuris, John A., et al. “Cationic lipid-mediated delivery of proteins enables efficient protein-based genome editing in vitro and in vivo.” Nature biotechnology 33.1 (2015): 73. PubMed

[0936] Rouet, Romain, et al. “Receptor-Mediated Delivery of CRISPR-Cas9 Endonuclease for Cell-Type-Specific Gene Editing.” Journal of the American Chemical Society 140.21 (2018): 6596-6603. PubMed.

[0937] FIG. 68C provides data showing that various disclosed PE ribonucleoprotein complexes (PE2 at high concentration, PE3 at high concentration and PE3 at low concentration) can be delivered in this manner

Delivery of PE by mRNA

[0938] Another method that may be employed to deliver multi-flap prime editors and/or PEgRNAs to cells in which multi-flap prime editing-based genome editing is desired is by employing the use of messenger RNA (mRNA) delivery methods and technologies. Examples of mRNA delivery methods and compositions that may be utilized in the present disclosure including, for example, PCT/US2014/028330, U.S. Pat. No. 8,822,663B2, NZ700688A, ES2740248T3, EP2755693A4, EP2755986A4, WO2014152940A1, EP3450553B1, BR112016030852A2, and EP3362461A1, each of which are incorporated herein by reference in their entireties. Additional disclosure hereby incorporated by reference can be found in Kowalski et al., “Delivering the Messenger: Advances in Technologies for Therapeutic mRNA Delivery,” Mol Therap., 2019; 27(4): 710-728.

[0939] In contrast to DNA vector encoding multi-flap prime editors, the use of RNA as a delivery agent for multi-flap prime editors has the advantage that the genetic material does not have to enter the nucleus to perform its function. The delivered mRNA may be directly translated in the cytoplasm into the desired protein (e.g., prime editor fusion protein) and nucleic acid products (e.g., PEgRNA). However, in order to be more stable (e.g., resist RNA-degrading enzymes in the cytoplasm), it is in some embodiments necessary to stabilize the mRNA to improve delivery efficiency. Certain delivery carriers such as cationic lipids or polymeric delivery carriers can also help protect the transfected mRNA from endogenous RNase enzymes that might otherwise degrade the therapeutic mRNA encoding the desired prime editor fusion proteins. In addition, despite the increased stability of modified mRNA, delivery of mRNA, particularly mRNA encoding full-length protein, to cells in vivo in a manner that allows therapeutic levels of protein production remains a challenge.

[0940] With some exceptions, the intracellular delivery of mRNA is generally more challenging than that of small oligonucleotides, and it requires encapsulation into a delivery nanoparticle, in part due to the significantly larger size of mRNA molecules (300-5,000 kDa, ˜1-15 kb) as compared to other types of RNAs (small interfering RNAs [siRNAs], ˜14 kDa; antisense oligonucleotides [ASOs], 4-10 kDa).

[0941] mRNA must cross the cell membrane in order to reach the cytoplasm. The cell membrane is a dynamic and formidable barrier to intracellular delivery. It is made up primarily of a lipid bilayer of zwitterionic and negatively charged phospholipids, where the polar heads of the phospholipids point toward the aqueous environment and the hydrophobic tails form a hydrophobic core.

[0942] In some embodiments, the mRNA compositions of the disclosure comprise mRNA (encoding a prime editor and/or PEgRNA), a transport vehicle, and optionally an agent that facilitates contact with the target cell and subsequent transfection.

[0943] In some embodiments, the mRNA can include one or more modifications that confer stability to the mRNA (eg, compared to the wild-type or native version of the mRNA) and is involved in the associated abnormal expression of the protein. One or more modifications to the wild type that correct the defect may also be included. For example, the nucleic acids of the invention can include modifications of one or both of a 5′ untranslated region or a 3′ untranslated region. Such modifications may include the inclusion of sequences encoding a partial sequence of the cytomegalovirus (CMV) immediate early 1 (IE1) gene, poly A tail, Cap1 structure, or human growth hormone (hGH). In some embodiments, the mRNA is modified to reduce mRNA immunogenicity.

[0944] In one embodiment, the multi-flap prime editor mRNA in the composition of the invention can be formulated in a liposome transfer vehicle to facilitate delivery to target cells. Contemplated transfer vehicles can include one or more cationic lipids, non-cationic lipids, and/or PEG-modified lipids. For example, the transfer vehicle can include at least one of the following cationic lipids: C12-200, DLin-KC2-DMA, DODAP, HGT4003, ICE, HGT5000, or HGT5001. In embodiments, the transfer vehicle comprises cholesterol (chol) and/or PEG modified lipids. In some embodiments, the transfer vehicle comprises DMG-PEG2K. In certain embodiments, the transfer vehicle has the following lipid formulation: C12-200, DOPE, chol, DMG-PEG2K; DODAP, DOPE, cholesterol, DMG-PEG2K; HGT5000, DOPE, chol, DMG-PEG2K, HGT5001, DOPE, chol, one of DMG-PEG2K.

[0945] The present disclosure also provides compositions and methods useful for facilitating transfection of target cells with one or more PE-encoding mRNA molecules. For example, the compositions and methods of the present invention contemplate the use of targeting ligands that can increase the affinity of the composition for one or more target cells. In one embodiment, the targeting ligand is apolipoprotein B or apolipoprotein E, and the corresponding target cells express low density lipoprotein receptors and thus promote recognition of the targeting ligand. A vast number of target cells can be preferentially targeted using the methods and compositions of the present disclosure. For example, contemplated target cells include hepatocytes, epithelial cells, hematopoietic cells, epithelial cells, endothelial cells, lung cells, bone cells, stem cells, mesenchymal cells, nerve cells, heart cells, adipocytes, vascular smooth muscle Includes cells, cardiomyocytes, skeletal muscle cells, beta cells, pituitary cells, synovial lining cells, ovarian cells, testis cells, fibroblasts, B cells, T cells, reticulocytes, leukocytes, granulocytes, and tumor cells However, it is not limited to these.

[0946] In some embodiments, the PE-encoding mRNA may optionally have chemical or biological modifications which, for example, improve the stability and/or half-life of such mRNA or which improve or otherwise facilitate protein production. Upon transfection, a natural mRNA in the compositions of the invention may decay with a half-life of between 30 minutes and several days. The mRNAs in the compositions of the disclosure may retain at least some ability to be translated, thereby producing a functional protein or enzyme. Accordingly, the invention provides compositions comprising and methods of administering a stabilized mRNA. In some embodiments, the activity of the mRNA is prolonged over an extended period of time. For example, the activity of the mRNA may be prolonged such that the compositions of the present disclosure are administered to a subject on a semi-weekly or bi-weekly basis, or more preferably on a monthly, bi-monthly, quarterly or an annual basis. The extended or prolonged activity of the mRNA of the present invention is directly related to the quantity of protein or enzyme produced from such mRNA. Similarly, the activity of the compositions of the present disclosure may be further extended or prolonged by modifications made to improve or enhance translation of the mRNA. Furthermore, the quantity of functional protein or enzyme produced by the target cell is a function of the quantity of mRNA delivered to the target cells and the stability of such mRNA. To the extent that the stability of the mRNA of the present invention may be improved or enhanced, the half-life, the activity of the produced protein or enzyme and the dosing frequency of the composition may be further extended.

[0947] Accordingly, in some embodiments, the mRNA in the compositions of the disclosure comprise at least one modification which confers increased or enhanced stability to the nucleic acid, including, for example, improved resistance to nuclease digestion in vivo. As used herein, the terms “modification” and “modified” as such terms relate to the nucleic acids provided herein, include at least one alteration which preferably enhances stability and renders the mRNA more stable (e.g., resistant to nuclease digestion) than the wild-type or naturally occurring version of the mRNA. As used herein, the terms “stable” and “stability” as such terms relate to the nucleic acids of the present invention, and particularly with respect to the mRNA, refer to increased or enhanced resistance to degradation by, for example nucleases (i.e., endonucleases or exonucleases) which are normally capable of degrading such mRNA. Increased stability can include, for example, less sensitivity to hydrolysis or other destruction by endogenous enzymes (e.g., endonucleases or exonucleases) or conditions within the target cell or tissue, thereby increasing or enhancing the residence of such mRNA in the target cell, tissue, subject and/or cytoplasm. The stabilized mRNA molecules provided herein demonstrate longer half-lives relative to their naturally occurring, unmodified counterparts (e.g. the wild-type version of the mRNA). Also contemplated by the terms “modification” and “modified” as such terms related to the mRNA of the present invention are alterations which improve or enhance translation of mRNA nucleic acids, including for example, the inclusion of sequences which function in the initiation of protein translation (e.g., the Kozak consensus sequence). (Kozak, M., Nucleic Acids Res 15 (20): 8125-48 (1987)).

[0948] In some embodiments, the mRNAs used in the compositions of the disclosure have undergone a chemical or biological modification to render them more stable. Exemplary modifications to an mRNA include the depletion of a base (e.g., by deletion or by the substitution of one nucleotide for another) or modification of a base, for example, the chemical modification of a base. The phrase “chemical modifications” as used herein, includes modifications which introduce chemistries which differ from those seen in naturally occurring mRNA, for example, covalent modifications such as the introduction of modified nucleotides, (e.g., nucleotide analogs, or the inclusion of pendant groups which are not naturally found in such mRNA molecules).

[0949] Other suitable polynucleotide modifications that may be incorporated into the PE-encoding mRNA used in the compositions of the disclosure include, but are not limited to, 4′-thio-modified bases: 4′-thio-adenosine, 4′-thio-guanosine, 4′-thio-cytidine, 4′-thio-uridine, 4′-thio-5-methyl-cytidine, 4′-thio-pseudouridine, and 4′-thio-2-thiouridine, pyridin-4-one ribonucleoside, 5-aza-uridine, 2-thio-5-aza-uridine, 2-thiouridine, 4-thio-pseudouridine, 2-thio-pseudouridine, 5-hydroxyuridine, 3-methyluridine, 5-carboxymethyl-uridine, 1-carboxymethyl-pseudouridine, 5-propynyl-uridine, 1-propynyl-pseudouridine, 5-taurinomethyluridine, 1-taurinomethyl-pseudouridine, 5-taurinomethyl-2-thio-uridine, 1-taurinomethyl-4-thio-uridine, 5-methyl-uridine, 1-methyl-pseudouridine, 4-thio-1-methyl-pseudouridine, 2-thio-1-methyl-pseudouridine, 1-methyl-1-deaza-pseudouridine, 2-thio-1-methyl-1-deaza-pseudouridine, dihydrouridine, dihydropseudouridine, 2-thio-dihydrouridine, 2-thio-dihydropseudouridine, 2-methoxyuridine, 2-methoxy-4-thio-uridine, 4-methoxy-pseudouridine, 4-methoxy-2-thio-pseudouridine, 5-aza-cytidine, pseudoisocytidine, 3-methyl-cytidine, N4-acetylcytidine, 5-formylcytidine, N4-methylcytidine, 5-hydroxymethylcytidine, 1-methyl-pseudoisocytidine, pyrrolo-cytidine, pyrrolo-pseudoisocytidine, 2-thio-cytidine, 2-thio-5-methyl-cytidine, 4-thio-pseudoisocytidine, 4-thio-1-methyl-pseudoisocytidine, 4-thio-1-methyl-1-deaza-pseudoisocytidine, 1-methyl-1-deaza-pseudoisocytidine, zebularine, 5-aza-zebularine, 5-methyl-zebularine, 5-aza-2-thio-zebularine, 2-thio-zebularine, 2-methoxy-cytidine, 2-methoxy-5-methyl-cytidine, 4-methoxy-pseudoisocytidine, 4-methoxy-1-methyl-pseudoisocytidine, 2-aminopurine, 2,6-diaminopurine, 7-deaza-adenine, 7-deaza-8-aza-adenine, 7-deaza-2-aminopurine, 7-deaza-8-aza-2-aminopurine, 7-deaza-2,6-diaminopurine, 7-deaza-8-aza-2,6-diaminopurine, 1-methyladenosine, N6-methyladenosine, N6-isopentenyladenosine, N6-(cis-hydroxyisopentenyl)adenosine, 2-methylthio-N6-(cis-hydroxyisopentenyl)adenosine, N6-glycinylcarbamoyladenosine, N6-threonylcarbamoyladenosine, 2-methylthio-N6-threonyl carbamoyladenosine, N6,N6-dimethyladenosine, 7-methyladenine, 2-methylthio-adenine, and 2-methoxy-adenine, inosine, 1-methyl-inosine, wyosine, wybutosine, 7-deaza-guanosine, 7-deaza-8-aza-guanosine, 6-thio-guanosine, 6-thio-7-deaza-guanosine, 6-thio-7-deaza-8-aza-guanosine, 7-methyl-guanosine, 6-thio-7-methyl-guanosine, 7-methylinosine, 6-methoxy-guanosine, 1-methylguanosine, N2-methylguanosine, N2,N2-dimethylguanosine, 8-oxo-guanosine, 7-methyl-8-oxo-guanosine, 1-methyl-6-thio-guanosine, N2-methyl-6-thio-guanosine, and N2,N2-dimethyl-6-thio-guanosine, and combinations thereof. The term modification also includes, for example, the incorporation of non-nucleotide linkages or modified nucleotides into the mRNA sequences of the present invention (e.g., modifications to one or both of the 3′ and 5′ ends of an mRNA molecule encoding a functional protein or enzyme). Such modifications include the addition of bases to an mRNA sequence (e.g., the inclusion of a poly A tail or a longer poly A tail), the alteration of the 3′ UTR or the 5′ UTR, complexing the mRNA with an agent (e.g., a protein or a complementary nucleic acid molecule), and inclusion of elements which change the structure of an mRNA molecule (e.g., which form secondary structures).

[0950] In some embodiments, PE-encoding mRNAs include a 5′ cap structure. A 5′ cap is typically added as follows: first, an RNA terminal phosphatase removes one of the terminal phosphate groups from the 5′ nucleotide, leaving two terminal phosphates; guanosine triphosphate (GTP) is then added to the terminal phosphates via a guanylyl transferase, producing a 5′5′5 triphosphate linkage; and the 7-nitrogen of guanine is then methylated by a methyltransferase. Examples of cap structures include, but are not limited to, m7G(5′)ppp (5′(A,G(5′)ppp(5′)A and G(5′)ppp(5′)G. Naturally occurring cap structures comprise a 7-methyl guanosine that is linked via a triphosphate bridge to the 5′-end of the first transcribed nucleotide, resulting in a dinucleotide cap of m7G(5′)ppp(5′)N, where N is any nucleoside. In vivo, the cap is added enzymatically. The cap is added in the nucleus and is catalyzed by the enzyme guanylyl transferase. The addition of the cap to the 5′ terminal end of RNA occurs immediately after initiation of transcription. The terminal nucleoside is typically a guanosine, and is in the reverse orientation to all the other nucleotides, i.e., G(5′)ppp(5′)GpNpNp.

[0951] Additional cap analogs include, but are not limited to, a chemical structures selected from the group consisting of m7GpppG, m7GpppA, m7GpppC; unmethylated cap analogs (e.g., GpppG); dimethylated cap analog (e.g., m2,7GpppG), trimethylated cap analog (e.g., m2,2,7GpppG), dimethylated symmetrical cap analogs (e.g., m7Gpppm7G), or anti reverse cap analogs (e.g., ARCA; m7,2′OmeGpppG, m72′dGpppG, m7,3′OmeGpppG, m7,3′dGpppG and their tetraphosphate derivatives) (see, e.g., Jemielity, J. et al., “Novel ‘anti-reverse’ cap analogs with superior translational properties”, RNA, 9: 1108-1122 (2003)).

[0952] Typically, the presence of a “tail” serves to protect the mRNA from exonuclease degradation. A poly A or poly U tail is thought to stabilize natural messengers and synthetic sense RNA. Therefore, in certain embodiments a long poly A or poly U tail can be added to an mRNA molecule thus rendering the RNA more stable. Poly A or poly U tails can be added using a variety of art-recognized techniques. For example, long poly A tails can be added to synthetic or in vitro transcribed RNA using poly A polymerase (Yokoe, et al. Nature Biotechnology. 1996; 14: 1252-1256). A transcription vector can also encode long poly A tails. In addition, poly A tails can be added by transcription directly from PCR products. Poly A may also be ligated to the 3′ end of a sense RNA with RNA ligase (see, e.g., Molecular Cloning A Laboratory Manual, 2nd Ed., ed. by Sambrook, Fritsch and Maniatis (Cold Spring Harbor Laboratory Press: 1991 edition)).

[0953] Typically, the length of a poly A or poly U tail can be at least about 10, 50, 100, 200, 300, 400 at least 500 nucleotides. In some embodiments, a poly-A tail on the 3′ terminus of mRNA typically includes about 10 to 300 adenosine nucleotides (e.g., about 10 to 200 adenosine nucleotides, about 10 to 150 adenosine nucleotides, about 10 to 100 adenosine nucleotides, about 20 to 70 adenosine nucleotides, or about 20 to 60 adenosine nucleotides). In some embodiments, mRNAs include a 3′ poly(C) tail structure. A suitable poly-C tail on the 3′ terminus of mRNA typically include about 10 to 200 cytosine nucleotides (e.g., about 10 to 150 cytosine nucleotides, about 10 to 100 cytosine nucleotides, about 20 to 70 cytosine nucleotides, about 20 to 60 cytosine nucleotides, or about 10 to 40 cytosine nucleotides). The poly-C tail may be added to the poly-A or poly U tail or may substitute the poly-A or poly U tail.

[0954] PE-encoding mRNAs according to the present disclosure may be synthesized according to any of a variety of known methods. For example, mRNAs according to the present invention may be synthesized via in vitro transcription (IVT). Briefly, IVT is typically performed with a linear or circular DNA template containing a promoter, a pool of ribonucleotide triphosphates, a buffer system that may include DTT and magnesium ions, and an appropriate RNA polymerase (e.g., T3, T7 or SP6 RNA polymerase), DNAse I, pyrophosphatase, and/or RNAse inhibitor. The exact conditions will vary according to the specific application.

[0955] In embodiments involving mRNA delivery, the ratio of the mRNA encoding the PE fusion protein to the PEgRNA may be important for efficient editing. In certain embodiments, the weight ratio of mRNA (encoding the PE fusion protein) to PEgRNA is 1:1. In certain other embodiments, the weight ratio of mRNA (encoding the PE fusion protein) to PEgRNA is 2:1. In still other embodiments, the weight ratio of mRNA (encoding the PE fusion protein) to PEgRNA is 1:2. In still further embodiments, the weight ratio of mRNA (encoding the PE fusion protein) to PEgRNA is selected from the group consisting of about 1:1000, 1:900; 1:800; 1:700; 1:600; 1:500; 1:400; 1:300; 1:200; 1:100; 1:90; 1:80; 1:70; 1:60; 1:50; 1:40; 1:30; 1:20; 1:10; and 1:1. In other embodiments, the weight ratio of mRNA (encoding the PE fusion protein) to PEgRNA is selected from the group consisting of about 1:1000, 1:900; 800:1; 700:1; 600:1; 500:1; 400:1; 300:1; 200:1; 100:1; 90:1; 80:1; 70:1; 60:1; 50:1; 40:1; 30:1; 20:1; 10:1; and 1:1.

[0956] F. Use of Multi-Flap Prime Editing for Insertion of Inducible Dimerization Domains

[0957] The multi-flap prime editors (as represented by FIGS. 90, 95, 97A, 98A) described herein may also be used to install dimerization domains into one or more protein targets. The dimerization domains may facilitate inducible regulation of the activity associated with the dimerization of the one or more protein targets via a linking moiety (e.g., a small molecule, peptide, or protein) that binds in a bi-specific manner In various aspects, the dimerization domains, when installed on different proteins (e.g., the same type or different proteins), each bind to the same bi-specific moiety (e.g., a bi-specific small molecule, peptide, or polypeptide having a least two regions that separately bind to the dimerization domains), thereby causing the dimerization of the proteins through their common interaction to the bi-specific ligand. In this manner, the bi-specific ligand functions as an “inducer” of dimerization of two proteins. In some cases, the bi-specific ligand or compound will have two targeting moieties that are the same. In other embodiments, the bi-specific ligand or compound will have targeting moieties that are each different from the other. The bi-specific ligand or compound having the same two targeting moieties will be able to target the same dimerization domain installed on different protein targets. The bi-specific ligand or compound having different targeting moieties will be able to target different dimerization domains installed on different protein targets.

[0958] As used herein, the term “dimerization domain” refers to a ligand-binding domain that binds to a binding moiety of a bi-specific ligand. A “first” dimerization domain binds to a first binding moiety of a bi-specific ligand and a “second” dimerization domain binds to a second binding moiety of the same bi-specific ligand. When the first dimerization domain is fused to a first protein (e.g., via PE, as discussed herein) and the second dimerization domain (e.g., via PE, as discussed herein) is fused to a second protein, the first and second protein dimerize in the presence of a bi-specific ligand, wherein the bi-specific ligand has at least one moeity that binds to the first dimerization domain and at least another moiety that binds to the second dimerization domain

[0959] The term “bi-specific ligand” or “bi-specific moiety,” as used herein, refers to a ligand that binds to two different ligand-binding domains. In various embodiments, the bi-specific moiety itself is a dimer of two of same or two different chemical moieties, wherein each moiety specifically and tightly binds to a dimerization domain In certain embodiments, the ligand is a small molecule compound, or a peptide, or a polypeptide. In other embodiments, ligand-binding domain is a “dimerization domain,” which can be install as a peptide tag onto a protein. In various embodiments, two proteins each comprising the same or different dimerization domains can be induced to dimerize through the binding of each dimerization domain to the bi-specific ligand. These molecules may also be referred to as “chemical inducers of dimerization” or CIDs. In addition, the bi-specific ligands may be prepared by coupling (e.g., through standardize chemical linkages) two of the same moieties together, or two different moieties together, wherein each moiety tightly and specifically binds to a dimerization domain

[0960] In various aspects, the dimerization domains installed by multi-flap PE can be the same or different.

[0961] For example, the dimerization domains can be FKBP12, which has the following amino acid sequence:

FKBP12
(SEQ ID NO: 488)
MGVQVETISPGDGRTFPKRGQTCVVHYTGML
EDGKKFDSSRDRNKPFKFMLGKQEVIRGWEE
GVAQMSVGQRAKLTISPDYAYGATGHPGIIPPH
ATLVFDVELLKLE

[0962] In another example, the dimerization domain can be a mutant of FKBP12 referred to as FKBP12-F36V, a mutant of FKBP12 with an engineered hole that binds a synthetic bumped FK506 mimic (2, FIG. 3)¹⁰⁷:

FKBP12-F36V
(SEQ ID NO: 489)
MGVQVETISPGDGRTFPKRGQTCVVHYTGML
EDGKKVDSSRDRNKPFKFMLGKQEVIRGWEE
GVAQMSVGQRAKLTISPDYAYGATGHPGIIPPH
ATLVFDVELLKLE

[0963] In another example, the dimerization domain can be cyclophilin, as follows:

CYCLOPHILIN
(SEQ ID NO: 490)
MVNPTVFFDIAVDGEPLGRVSFELFADKVPKT
AENFRALSTGEKGFGYKGSCFHRIIPGFMCQG
GDFTRHNGTGGKSIYGEKFEDENFILKHTGPGI
LSMANAGPNTNGSQFFICTAKTEWLDGKHVV
FGKVKEGMNIVEAMERFGSRNGKTSKKITIAD
CGQLE

[0964] In various embodiments, the amino acid sequences of these dimerization domains may be altered in order to optimize binding or to improve binding orthogonality to native targets. The nucleic acid sequences of the genes encoding small-molecule binding proteins may be altered in order to optimize the efficiency of the PE process, such as by reducing PEgRNA secondary structure.

[0965] Other examples of suitable dimerization domains and a cognate small molecule compound which binds thereto are provided as follows. Note that the cognate small molecule compound could be coupled (e.g., via a chemical linker) to a second small molecule compound (either the same compound or a different compound) in order to form a bi-specific ligand that may bind two dimerization domains. In some cases, such as FK506 and cyclosporin A, dimerization of each (e.g., FK506-FK506 or cyclosporin A-cyclosporin A) reduces or eliminates immunosuppressive activity of the monomeric compounds.

| SMALL MOLECULE-BINDS TO THE DIMERIZATION DOMAIN- | |
|---|---|
| A DIMER OF THESE MOLECULES WOULD CONSTITUTE A BI-SPECIFIC | |
| LIGAND THAT WOULD BIND TWO DIMERIZATION DOMAINS | DIMERIZATION DOMAIN(S) |
| [chemical structure] | AMINO ACID SEQUENCE OF FKBP12: MGVQVETISPGDGRTFPKRGQTCVVHYTG MLEDGKKFDSSRDRNKPFKFMLGKQEVIR GWEEGVAQMSVGQRAKLTISPDYAYGATG HPGIIPPHATLVFDVELLKLE (SEQ ID NO: 491) CALCINEURIN: |
| [chemical structure] | AMINO ACID SEQUENCE OF HUMAN CYCLOPHILIN A: MVNPTVFFDIAVDGEPLGRVSFELFAD KVPKTAENFRALSTGEKGFGYKGSCFH RIIPGFMCQGGDFTRHNGTGGKSIYGE KFEDENFILKHTGPGILSMANAGPNTN GSQFFICTAKTEWLDGKHVVFGKVKE GMNIVEAMERFGSRNGKTSKKITIADC GQLE (SEQ ID NO: 490) AMINO ACID SEQUENCE OF HUMAN CYCLOPHILIN B: MLRLSERNMKVLLAAALIAGSVFFLLL PGPSAADEKKKGPKVTVKVYFDLRIG DEDVGRVIFGLFGKTVPKTVDNFVALA TGEKGFGYKNSKFHRVIKDFMIQGGDF TRGDGTGGKSIYGERFPDENFKLKHYG PGWVSMANAGKDTNGSQFFITTVKTA WLDGKHVVFGKVLEGMEVVRKVEST KTDSRDKPLKDVIIADCGKIEVEKPFAI AKE (SEQ ID NO: 493) AMINO ACID SEQUENCE OF MURINE CYCLOPHILIN C: MSPGPRLLLPAVLCLGLGALVSSSGSSG VRKRGPSVTDKVFFDVRIGDKDVGRIV IGLFGNVVPKTVENFVALATGEKGYGY KGSIFHRVIKDFMIQGGDFTARDGTGG MSIYGETFPDENFKLKHYGIGWVSMA NAGPDTNGSQFFITLTKPTWLDGKHVV FGKVLDGMTVVHSIELQATDGHDRPLT DCTIVNSGKIDVKTPFVVEVPDW (SEQ ID NO: 494) |
| [chemical structure] | AMINO ACID SEQUENCE OF FKBP12-F36V MGVQVETISPGDGRTFPKRGQTCVVHYTG MLEDGKKVDSSRDRNKPFKFMLGKQEVIR GWEEGVAQMSVGQRAKLT ISPDYAYGATGHPGIIPPHATLVFDVELLKL E (SEQ ID NO: 495) |
| [chemical structure] | AMINO ACID SEQUENCE OF HUMAN DIHYDROFOLATE REDUCTASE MVGSLNCIVAVSQNMGIGKNGDLPWPPLR NEFRYFQRMTTTSSVEGKQNLVIMGKKTW FSIPEKNRPLKGRINLVLSRELKEPPQGAHF LSRSLDDALKLTEQPELANKVDMVWIVGG SSVYKEAMNHPGHLKLFVTRIMQDFESDT FFPEIDLEKYKLLPEYPGVLSDVQEEKGIK YKFEVYEKND (SEQ ID NO: 496) |
| [chemical structure] | AMINO ACID SEQUENCE FOR E. COLI DIHYDROFOLATE REDUCTASE MISLIAALAVDRVIGMENAMPWNLPADLA WFKRNTLNKPVIMGRHTWESIGRPLPGRK NIILSSQPGTDDRVTWVKSVDEAIAACGDV PEIMVIGGGRVYEQFLPKAQKLYLTHIDAE VEGDTHFPDYEPDDWESVFSEFHDADAQN SHSYCFEILERR (SEQ ID NO: 497) |
| [chemical structure] | AMINO ACID SEQUENCE FOR HUMAN GLUCOCORTICOID RECEPTOR MDSKESLTPGREENPSSVLAQERGDVMDF YKTLRGGATVKVSASSPSLAVASQSDSKQR RLLVDFPKGSVSNAQQPDLSKAVSLSMGL YMGETETKVMGNDLGFPQQGQISLSSGET DLKLLEESIANLNRSTSVPENPKSSASTAVS AAPTEKEF PKTHSDVSSEQQHLKGQTGTNGGNVKLYT TDQSTFDILQDLEFSSGSPGKETNESPWRS DLLIDENCLLSPLAGEDDSFLLEGNSNEDC KPLILPDTKPKIKDNGDLVLSSPSNVTLPQV KTEKEDFIELCTPGVIKQEKLGTVYCQASF PGANIIGNKMSAISVHGVSTSGGQMYHYD MNTASLSQQQDQKPIFNVIPPIPVGSENWN RCQGSGDDNLTSLGTLNFPGRTVFSNGYSS PSMRPDVSSPPSSSSTATTGPPPKLCLVCSD EASGCHYGVLTCGSCKVFFKRAVEGQHNY LCAGRNDCIIDKIRRKNCPACRYRKCLQAG |
| | MNLEARKTKKKIKGIQQATTGVSQETSEN |
| | PGNKTIVPATLPQLTPTLVSLLEVIEPEVLYA |
| | GYDSSVPDSTWRIMTTLNMLGGRQVIAAV |
| | KWAKAIPGFRNLHLDDQMTLLQYSWMFL |
| | MAFALGWRSYRQSSANLLCFAPDLIINEQR |
| | MTLPCMYDQCKHMLYVSSELHRLQVSYE |
| | EYLCMKTLLLLSSVPKDGLKSQELFDEIRM |
| | TYIKELGKAIVKREGNSSQNWQRFYQLTK |
| | LLDSMHEVVENLLNYCFQTFLDKTMSIEFP |
| | EMLAEIITNQIPKYSNGNIKKLLFHQK (SEQ |
| | ID NO: 498) |
| [chemical structure] | AMINO ACID SEQUENCE OF FKBP12: MGVQVETISPGDGRTFPKRGQTCVVHYTG MLEDGKKFDSSRDRNKPFKFMLGKQEVIR GWEEGVAQMSVGQRAKLTISPDYAYGATG HPGIIPPHATLVFDVELLKLE (SEQ ID NO: 491) |

[0966] Other examples of naturally occurring bifunctional molecules and their dual target receptors are as follows. Prime editing may be used to install the dual target receptors into different proteins. Once the different proteins are modified by PE to contain a bifunctional molecule receptor, the bifunctional molecules may be introduced, thereby causing the dimerization of the proteins modified to comprise the different dimerization domains. Examples of pairings of (1) a biofunctional molecule and (2) their dual target receptors are as follows:

| | TARGET |
|---|---|
| NATURALLY | RECEPTORS |
| OCCURRING | OF THE |
| BIOFUNCTIONAL | BIOFUNCTIONAL |
| MOLECULES | MOLECULE |
| [chemical structure] | Target receptor 1: auxin receptor Target receptor 2: TIR1 E3 ligase |
| [chemical structure] | Target receptor 1: JAZ receptor Target receptor 2: Col1 E3 ligase |
| [chemical structure] | target receptor 1: GBF1 target receptor 2: GTPase Arf1p |
| [chemical structure] | target receptor 1: PYR receptor target receptor 2: phosphoprotein phosphatase 2C |
| [chemical structure] | target receptor 1: adenylyl cyclase monomers target receptor 2: adenylyl cyclase monomers |
| [chemical structure] | target receptor 1: 14-3-3 proteins target receptor 2: H⁺-ATPase |
| [chemical structure] | target receptor 1: FKBP12 target receptor 2: mTOR |
| [chemical structure] | target receptor 1: cyclophilin target receptor 2: IMP dehydrogenase 2 |
| [chemical structure] | target receptor 1: cyclophilin target receptor 2: calcineurin |

[chemical structure]

[0967] Examples of other bifunctional molecules that can be used with this aspect of prime editing are as follows:

[0968] Synstab A:

[chemical structure]

[0969] Paclitaxel:

[chemical structure]

[0970] Discodermolide:

[chemical structure]

[0971] Synstab A, paclitaxel, and discodermolide are microtubule stabilizers. Thus, these compounds could be used to dimerize proteins modified by PE to comprise microtubule proteins. GNE-0011, ARV-825, and dBET1 comprise a BRD4 binding motif and a CRBN binding motif. Thus, these compounds could be used to dimerize proteins modified by PE to comprise these targeting domains.

[0972] The PEgRNAs for installing dimerization domains may comprising the following structures (in reference to FIG. 3D):
[0973] 5′-[spacer]-[gRNA core]-[extension arm]-3′, wherein the the extension arm comprises 5′-[homology arm]-[edit template]-[primer binding site]-3′; or
[0974] 5′-[extension arm]-[spacer]-[gRNA core]-3′, wherein the the extension arm comprises 5′-[homology arm]-[edit template]-[primer binding site]-3′, and wherein with either configuration the “edit template” comprises a nucleotide sequence of a dimerization domain

[0975] In one example, the PEgRNA for insertion of the FKBP12 dimerization domain at the C-terminal end of human insulin receptor (spacer underlined, gRNA core plain, flap homology bold, FKBP12 insertion in italics, annealing region bold italics):

PEGRNA FOR INSTALLING FKBP12 IN HUMAN INSULIN
RECEPTOR
(SEQ ID NO: 499)
CACGGUAGGCACUGUUAGGAGUUUUAGAG
CUAGAAAUAGCAAGUUAAAAUAAGGCUAG
UCCGUUAUCAACUUGAAAAAGUGGCACCG
AGUCGGUGCUUGCCUCGGUCCAAUCCUUC
CGGAGUGCAGGUGGAAACCAUCUCCCCAGGA
GACGGGCGCACCUUCCCCAAGCGCGGCCAGA
CCUGCGUGGUGCACUACACCGGGAUGCUUG
AAGAUGGAAAGAAAUUUGAUUCCUCCCGGGA
CAGAAACAAGCCCUUUAAGUUUAUGCUAGGC
AAGCAGGAGGUGAUCCGAGGCUGGGAAGAAG
GGGUUGCCCAGAUGAGUGUGGGUCAGAGAG
CCAAACUGACUAUAUCUCCAGAUUAUGCCUA
UGGUGCCACUGGGCACCCAGGCAUCAUCCCA
CCACAUGCCACUCUCGUCUUCGAUGUGGAG
CUUCUAAAACUGGAA

[symbol]

[0976] In another example, the PEgRNA for insertion of the FKBP12 dimerization domain at the HEK3 locus (for optimization):

PEGRNA FOR INSTALLING FKBP12 IN HEK3
(SEQ ID NO: 500)
GGCCCAGACTGAGCACGTGAGTTTTAGAGC
TAGAAATAGCAAGTTAAAATAAGGCTAGTC
CGTTATCAACTTGAAAAAGTGGCACCGAGT
CGGTGCTGGAGGAAGCAGGGCTTCCTTTCCT
CTGCCATCATTCCAGTTTTAGAAGCTCCACA
TCGAAGACGAGAGTGGCATGTGGTGGGATG
ATGCCTGGGTGCCCAGTGGCACCATAGGCA
TAATCTGGAGATATAGTCAGTTTGGCTCTCT
GACCCACACTCATCTGGGCAACCCCTTCTTC
CCAGCCTCGGATCACCTCCTGCTTGCCTAGC
ATAAACTTAAAGGGCTTGTTTCTGTCCCGGG
AGGAATCAAATTTCTTTCCATCTTCAAGCAT
CCCGGTGTAGTGCACCACGCAGGTCTGGCC
GCGCTTGGGGAAGGTGCGCCCGTCTCCTGG
GGAGATGGTTTCCACCTGCACTCCCGTGCTC
AGTCTG

[0977] The target proteins for installing dimerization domains are not particularly limited; however, it is advantagous their dimerization (once modified by PE) in the presence of a bi-specific ligand produces some advantagous biological effect, e.g., a signaling pathway, decreased immunoresponsiveness, etc. In various aspects, the target proteins that are to be dimerized through the PE-dependent installation of dimerization domains can be the same protein or different proteins. Preferably, the proteins, when dimerized, trigger one or more downstream biological cascades, e.g., a signal transduction cascade, phorsphorylation, etc. Exemplary target proteins into which PE may be used to install dimerization domains, include, but are not limited to:

| MEMBRANDE- | KINASE | | | |
|---|---|---|---|---|
| BOUND | DOMAIN | CID | SIGNALING | |
| RECEPTOR | FUSED TO | EMPLOYED | CASCADE | REFERENCE |
| T-CELL | FKBP12 | FK1012 | T-CELL | SCIENCE 262, 1019-24 |
| RECEPTOR | | (FK506 | RECEPTOR | (1993) |
| | | DIMER) | SIGNALING | CHEM. BIOL. 1, 163-172 |
| | | | | (1994). |
| FAS RECEPTOR | MURINE | CYCLO- | FAS PATHWAY | CHEM. BIOL. 3, 731-738 |
| | CYCLO- | SPORIN A | FOR | (1996). |
| | PHILIN C | DIMER | APOPTOSIS | |
| INSULIN | FKBP12 | FK1012 | INSULIN | CURR. BIOL. 8, 11-18 |
| RECEPTOR | | (FK506 | SIGNALING | (1998). |
| | | DIMER) | | |
| PLATELET- | FKBP12 | FK1012 | PDGF | CURR. BIOL. 8, 11-18 |
| DERIVED | | (FK506 | MESODERM | (1998). |
| GROWTH | | DIMER) | FORMATION | |
| FACTOR (PDGF) | | | SIGNALING | |
| BETA | | | | |
| ERYTHRO- | FKBP12 | FK1012 | EPOR- | PROC. NATL. ACAD. |
| POIETIN | | (FK506 | MEDIATED | SCI. 94, 3076-3081 (2002). |
| RECEPTOR | | DIMER) | PROLIFERATIVE | |
| (EPOR) | | | SIGNALING | |

[0978] In one aspect, the multi-flap prime editor systems described herein may be used to install sequences encoding dimerization domains into one or more genes encoding target proteins of interest in a living cell or patient. This may be referred to as the “multi-flap prime editing—CID system,” wherein the CID is the bi-specific ligand that induced dimerization of target proteins, each fused to a dimerization domain installed by multi-flap PE. This edit alone should have no physiological effect. Upon administration of a bi-specific ligand, which typically is a dimeric small molecule that can simultaneously bind to two dimerization domains, each of which is fused to a copy of the target protein, the bi-specific ligand causes dimerization of the targeted protein. This target protein dimerization event then induces a biological signaling event, such as erythropoiesis or insulin signaling. A new method to place dimerization-induced biological processes, such as receptor signaling, under control of a convenient small-molecule drug (i.e., the bi-specific ligand) by the genomic integration of genes encoding small-molecule binding proteins (i.e., the dimerization domains) with multi-flap prime editing is described herein.

[0979] Protein dimerization is a ubiquitous biological process. Notably, homodimerization of many membrane-bound receptors is known to initiate signaling cascades, often with profound biological consequences. A number of small-molecule natural products approved for use as drugs act as chemical inducers of protein dimerization as part of their mechanism of action.' For example, FK506 binds tightly to FKBP12, and the resulting small molecule—protein complex then binds the phosphatase calcineurin, thereby inhibiting a step in T cell receptor signaling.' Likewise, cyclosporin A induces dimerization of cyclophilin and calcineurin, and rapamycin induces dimerization of FKBP and mTOR.^{93,94}

[0980] In one embodiment, leveraging the selective, high-affinity binding of the FK506:FKBP12 and cyclosporin A:cyclophilin small molecule:protein binding interaction, synthetic chemical inducers of dimerization have also been developed. In an example, a small molecule comprised of two units of FK506, termed FK1012, was shown to effect signal transduction when the cytoplasmic domains of signaling receptors were tagged with FKBP12.⁹⁵ Chemical inducers of dimerization (CIDs) have since been used to control a number of signaling pathways.96-103

[0981] While useful tools for studying biological processes, one challenge facing synthetic CIDs for therapeutic applications is that introduction of the FKBP12—or cyclophilin—target protein chimeras into patients is challenging.

[0982] The present disclosure brings together multiple concepts to create a previously inaccessible therapeutic process. The first concept is multi-flap prime editing (e.g., dual flap or quadruple flap prime editing), described herein, which allows for precise genome editing, including targeted insertions, in living cells. The second concept is chemical-induced dimerization, a powerful tool that has enabled small-molecule control over signaling and oligomerization processes in cell culture.

[0983] Specific cases in which chemical control over protein dimerization may have had a beneficial therapeutic effect have been identified.

[0984] The insulin receptor is a heterotetrameric transmembrane protein that responds to insulin binding to the extracellular domain by phosphorylation of the cytoplasmic kinase domain.¹⁰⁴ An engineered chimeric protein composed of a membrane-localization component, the C-terminal kinase domain of the insulin receptor, and three copies of FKBP12 responds to FK1012 and initiates the insulin response in cell culture.⁹⁹ Similarly, it is expected that the fusion of FKBP12 to the C-terminal end of the kinase domain of the native insulin receptor in patient cells should allow for FK1012-dependent phosphorylation and initiation of the insulin signaling cascade. This system could replace or complement insulin use in patients who cannot make insulin (e.g., type-1 diabetics), or who respond weakly to insulin (e.g., type-2 diabetics).

[0985] Additionally, erythropoietin stimulates erythrocyte proliferation by binding to the erythropoietin receptor (EpoR), either inducing dimerization or a conformational change in a preformed receptor dimer which results in activation of the Jak/STAT signaling cascade.¹⁰⁵ It has been demonstrated that FK1012-induced oligomerization of the membrane-anchored cytoplasmic domain of EpoR tagged with FKBP12 is sufficient to initiate the Jak/STAT signaling cascade and promote cell proliferation. ¹⁰⁶ It is anticipated that fusing FKBP12 to native EpoR by prime editing in patient cells will allow for FK1012-induced control over erythrocyte proliferation (erythropoiesis). This system could be used to trigger red blood cell growth in anemic patients. FK1012-inducible EpoR could also be employed as an in vivo selectable marker for blood cells that have undergone ex vivo engineering.

[0986] In principle, any receptor tyrosine kinase could be viable target for a multi-flap prime editing—CID therapeutic. The table below includes a list of all receptor tyrosine kinases in the human genome.¹¹⁰

| | | | NT | PROT | |
|---|---|---|---|---|---|
| Family | Receptor | Synonyms | Accession | Accession | Chromosome |
| ALK | ALK | Ki1 | NM_004304 | NP_004295 | 2p23 |
| family | LTK | TYK1 | NM_002344 | NP_002335 | 15q15.1-q21.1 |
| AXL | AXL | UFO, Tyro7(r) Ark(m) | NM_001699 | NP_001690 | 19q13.1 |
| family | MER | MERTK, NYK, Eyk(ch) | NM_006343 | NP_006334 | 2q14.1 |
| | TYRO3 | RSE, SKY, BRT, DTK, | NM_006293 | NP_006284 | 15q15.1-q21.1 |
| | | TIF | | | |
| DDR | DDR1 | CAK, TRKE, NEP | NM_013993 | NP_001945 | 6p21.3 |
| family | | NTRK4, EDDR1, PTK3 | | | |
| | DDR2 | TKT, TYRO10, | NM_006182 | NP_006173 | 1q21-q22 |
| | | NTRKR3 | | | |
| EGFR | EGFR | ERBB, ERBB1 | NM_005228 | NP_005219 | 7p12 |
| family | ERBB2 | HER2, Neu(r), NGL | NM_004448 | NP_004439 | 17q11.2-q12 |
| | ERBB3 | HER3 | NM_001982 | NP_001973 | 12q13 |
| | ERBB4 | HER4 | NM_005235 | NP_005226 | 2q33.3-q34 |
| EPH | EPHA1 | EPH, EPHT | NM_005232 | NP_005223 | 7q32-q36 |
| family | EPHA2 | ECK, Sek(m), Myk2(m) | NM_004431 | NP_004422 | 1p34 |
| | EPHA3 | HEK, ETK1, Tyro4(r), | NM_005233 | NP_005224 | 3p11.2 |
| | | Mek4(m), Cek4(ch) | | | |
| | EPHA4 | HEK8, Tyro1(r), | NM_004438 | NP_004429 | 2q36qter |
| | | Sek1(m), Cek8(ch) | | | |
| | EPHA5 | HEK7, Ehk(r), Bsk(r), | L36644 | P54756 | |
| | | Cek7(ch) | | | |
| | EPHA6 | DKFZp434C1418, | AL133666 | | |
| | | Ehk2(r) | | | |
| | EPHA7 | HEK11, Mdk1(m), | NM_004440 | NP_004431 | 6q21 |
| | | Ebk(m), Ehk3(r), | | | |
| | | Cek11(ch) | | | |
| | EPHA8 | HEK3, KIAA1459, | AB040892 | CAB81612 | 1q23-q24 |
| | | Eek(r), Cek10(ch) | | | |
| | EPHB1 | NET, EPHT2, HEK6, | NM_004441 | NP_004432 | 3q21-q23 |
| | | Elk(r), Cek6(ch) | | | |
| | EPHB2 | HEK5, ERK, DRT, | AF025304 | AAB94602 | 1p36.1-p35 |
| | | EPHT3, Tyro5(r), | | | |
| | | Nuk(m), Sek3(m), | | | |
| | | Cek5(ch) | | | |
| | EPHB3 | HEK2, Tyro6, Mdk5(m), | NM_004443 | NP_004434 | 3q21-qter |
| | | Sek4(m) | | | |
| | EPHB4 | HTK, Tyro11(r), | NM_004444 | NP_004435 | |
| | | Mdk2(m), Myk1(m) | | | |
| | EPHB6 | HEP, Mep(m), Cek1(ch) | NM_004445 | NP_004436 | 7q33-q35 |
| FGFR | FGFR1 | FLT2, bFGFR, FLG, N- | M34641 | AAA35835 | 8p11.2 |
| family | | SAM | | | |
| | FGFR2 | KGFR, K-SAM, Bek(m), | NM_000141 | NP_000132 | 10q26 |
| | | CFD1, JWS, Cek3(ch) | | | |
| | FGFR3 | HBGFR, ACH, Cek2(ch) | NM_000142 | NP_000133 | 4p16.3 |
| | FGFR4 | | NM_002011 | NP_002002 | 5q35.1-qter |
| INSR | IGF1R | JTK13 | NM_000875 | NP_000866 | 15q25-q26 |
| family | INSR | IR | NM_000208 | NP_000199 | 19p13.3-p13.2 |
| | INSRR | IRR | J05046 | AAC31759 | 1q21-q23 |
| MET | MET | HGFR | NM_000245 | NP_000236 | 7q31 |
| Family | RON | MST1R, CDw136, | NM_002447 | NP_002438 | 3p21.3 |
| | | Fv2(m), STK(m), | | | |
| | | SEA(ch) | | | |
| MUSK | MUSK | Nsk2(m), Mlk1(m), | NM_005592 | NP_005583 | 9q31.3-q32 |
| family | | Mk2(m) | | | |
| PDGFR | CSF1R | FMS, C-FMS, CD115 | NM_005211 | NP_005202 | 5q31-q32 |
| family | FLT3 | FLK2, STK1, CD135 | NM_004119 | NP_0041110 | 13q12 |
| | KIT | Sfr(m), CKIT | NM_000222 | NP_000213 | 4q11-q12 |
| | PDGFRA | | NM_006206 | NP_006197 | 4q11-q13 |
| | PDGFRB | PDGFR, JTK12 | NM_002609 | NP_002600 | 5q31-q32 |
| PTK7 | PTK7 | CCK4, KLG(ch) | NM_002821 | NP_002812 | 6p21.2-p12.2 |
| family | | | | | |
| RET | RET | MEN2A/B, HSCR1, | X12949 | P07949 | 10q11.2 |
| family | | MTC1 | | | |
| ROR | ROR1 | NTRKR1 | NM_005012 | NP_005003 | 1p32-p31 |
| family | ROR2 | NTRKR2 | NM_004560 | NP_004551 | |
| ROS | ROS1 | MCF3 | NM_002944 | NP_002935 | 6q22 |
| family | | | | | |
| RYK | RYK | Vlk(m), Mrk(m) | S59184 | AAB263411 | 3q22 |
| family | | | | | |
| TIE family | TEK | TIE2 | NM_000459 | NP_000450 | 9p21 |
| | TIE | TIE1, JTK14 | NM_005424 | NP_005415 | 1p34-p33 |
| TRK | NTRK1 | TRK, TRKA | NM_002529 | NP_002520 | 1q21-q22 |
| family | NTRK2 | TRKB | NM_006180 | NP_006171 | 9q22.1 |
| | NTRK3 | TRKC | NM_002530 | NP_002521 | 15q25 |
| VEGFR | VEGFR1 | FLT1 | NM_002019 | NP_002010 | 13q12 |
| family | VEGFR2 | KDR, FLK1 | | AAB88005 | 4q11-q12 |
| | VEGFR3 | FLT4, PCL | NM_002020 | NP_002011 | 5q34-q35 |
| AATYK | AATYK | AATK, KIAA0641 | NM_004920 | NP_004911 | 17q25.3 |
| family | AATYK2 | KIAA1079 | NM_014916 | NP_055731 | 7q21-q22 |
| | AATYK3 | | | | 19q13.2-q13.3 |

[0987] There are numerous advantages to the multi-flap prime editing—CID system. One such advantage is that it can replace endogenous ligands, which are typically proteins that pose complications in manufacturing, cost, delivery, production, or storage, with drug-like small-molecules that can be orally administered instead of administered by IV or injection, are readily prepared from FDA-approved drugs (or are themselves already drugs), and do not incur special production or storage costs typically associated with protein drugs. Another advantage is that the edit alone should have no physiological effect. The amount of target protein dimerization can be controlled by dosing the small-molecule CID. Further, target protein dimerization is readily and rapidly reversible by adding the monomeric form of the CID. Yet another advantage is that in instances where a single ligand targets multiple receptors, selectivity can be achieved by prime-editing only one receptor. Finally, depending on the delivery method used for prime editing, it may also be possible to restrict editing to a localized tissue or organ, allowing for inducible receptor activation only in specific areas.

[0988] If editing efficiencies are high enough with multi-flap prime editing that two separate editing events could occur at high levels, it would also be possible to tag two proteins of interest with different small-molecule binding domains (such as FKBP and cyclophilin) and induce heterodimerizations with small molecule heterodimers (such as an FK506—cyclosporin A dimer).

[0989] The fusion of FKBP12 or other small-molecule binding proteins to native proteins has been accomplished, generally by overexpression from plasmid in tissue culture. Subsequent chemical-induced dimerization has been demonstrated to induce phenotypic changes to cells producing the fusion proteins.

[0990] The following references are cited in the above section and are incorporated herein by reference.
[0991] 1. Crabtree, G. R. & Schreiber, S. L. Three-part inventions: intracellular signaling and induced proximity Trends Biochem. Sci. 21,418-22 (1996).
[0992] 2. Liu, J. et al. Calcineurin Is a Common Target of A and FKBP-FK506 Complexes. Cell 66,807-815 (1991).
[0993] 3. Keith, C. T. et al. A mammalian protein targeted by G1-arresting rapamycin—receptor complex. Nature 369,756-758 (2003).
[0994] 4. Spencer, D. M., Wandless, T. J., Schreiber, S. L. S. & Crabtree, G. R. Controlling signal transduction with synthetic ligands. Science 262,1019-24 (1993).
[0995] 5. Pruschy, M. N. et al. Mechanistic studies of a signaling pathway activated by the organic dimerizer FK1012. Chem. Biol. 1,163-172 (1994).
[0996] 6. Spencer, D. M. et al. Functional analysis of Fas signaling in vivo using synthetic inducers of dimerization. Curr. Biol. 6,839-847 (1996).
[0997] 7. Belshaw, P. J., Spencer, D. M., Crabtree, G. R. & Schreiber, S. L. Controlling programmed cell death with a cyclophilin-cyclosporin-based chemical inducer of dimerization. Chem. Biol. 3,731-738 (1996).
[0998] 8. Yang, J. X., Symes, K., Mercola, M. & Schreiber, S. L Small-molecule control of insulin and PDGF receptor signaling and the role of membrane attachment. Curr. Biol. 8,11-18 (1998).
[0999] 9. Belshaw, P. J., Ho, S. N., Crabtree, G. R. & Schreiber, S. L. Controlling protein association and subcellular localization with a synthetic ligand that induces heterodimerization of proteins. Proc.Natl. Acad. Sci. 93,4604-4607 (2002).
[1000] 10. Stockwell, B. R. & Schreiber, S. L. Probing the role of homomeric and heteromeric receptor interactions in TGF-β signaling using small molecule dimerizers. Curr. Biol. 8,761-773 (2004).
[1001] 11. Spencer, D. M., Graef, I., Austin, D. J., Schreiber, S. L. & Crabtree, G. R. A general strategy for producing conditional alleles of Src-like tyrosine kinases. Proc. Natl. Acad. Sci. 92,9805-9809 (2006).
[1002] 12. Holsinger, L. J., Spencer, D. M., Austin, D. J., Schreiber, S. L. & Crabtree, G. R. Signal transduction in T lymphocytes using a conditional allele of Sos. Proc. Natl. Acad. Sci. 92,9810-9814 (2006).
[1003] 13. Myers, M. G. Insulin Signal Transduction and the IRS Proteins. Annu. Rev. Pharmacol. Toxicol. 36, 615-658 (1996).
[1004] 14. Watowich, S. S. The erythropoietin receptor: Molecular structure and hematopoietic signaling pathways. J. Investig. Med. 59,1067-1072 (2011).
[1005] 15. Blau, C. A., Peterson, K. R., Drachman, J. G. & Spencer, D. M. A proliferation switch for genetically modified cells. Proc. Natl. Acad. Sci. 94, 3076-3081 (2002).
[1006] 16. Clackson, T. et al. Redesigning an FKBP-ligand interface to generate chemical dimerizers with novel specificity. Proc. Natl. Acad. Sci. 95, 10437-10442 (1998).
[1007] 17. Diver, S. T. & Schreiber, S. L. Single-step synthesis of cell-permeable protein dimerizers that activate signal transduction and gene expression. J. Am. Chem. Soc. 119, 5106-5109 (1997).
[1008] 18. Guo, Z. F., Zhang, R. & Liang, F. Sen. Facile functionalization of FK506 for biological studies by the thiol-ene ‘click’ reaction. RSC Adv. 4, 11400-11403 (2014).
[1009] 19. Robinson, D. R., Wu, Y.-M. & Lin, S.-F. The protein tyrosine kinase family of the human genome. Oncogene 19, 5548-5557 (2000).

[1010] G.Use of Multi-Flap Prime Editing for Inserting Recombinase Target Sites

[1011] In another aspect, multi-flap prime editing (e.g., as represented by FIGS. 90, 95, 97A, 98A) may be used to insert recombinase sites (or “recombinase recognition sequences”) into a desired genomic site. Insertion of recombinase sites provides a programmed location for effecting site-specific genetic changes in a genome. Such genetic changes can include, for example, genomic integration of a plasmid, genomic deletion or insertion, chromosomal translocations, and cassette exchanges, among other genetic changes. These exemplary types of genetic changes are illustrated in FIG. 64(b)-(f). The installed recombinase recognition sequences may then be used to conduct site-specific recombination at that site to effecuate a variety of recombination outcomes, such as, excision, integration, inversion, or exhange of DNA fragments. For example, FIG. 65 illustrates the installation of a recombinase site that can then be used to integrate a DNA donor template comprising a GFP expression marker. Cells containing the integrated GFP expression system into the recombinase site will fluoresce.

[1012] The mechanism of installing a recombinase site into the genome is analogous to installing other sequences, such as peptide/protein and RNA tags, into the genome. A schematic exemplifying the installation of a recombinase target sequence is shows in FIG. 64(a). The process begins with selecting a desired target locus into which the recombinase target sequence will be introduced. Next, a prime editor fusion is provided (“RT-Cas9:gRNA”). Here, the “gRNA” refers to a PEgRNA, which can be designed using the principles described herein. The PEgRNA in various embodiments will comprise an architecture corresponding to FIG. 3D (5′-[˜20-nt spacer]-[gRNA core]-[extension arm]-3′, wherein the extension arm comprises in the 3′ to 5′ direction, a primer binding site (“A”), an edit template (“B”), and a homology arm (“C”). The edit template (“B”) will comprise a sequence corresponding to a recombinase site, i.e., a single strand RNA of the PEgRNA that codes for a complementary single strand DNA that is either the sense or the antisense strand of the recombinase site and which is incorporated into the genomic DNA target locus through the multi-flap prime editing process.

[1013] In various aspects, the present dislosure provides for the use of a multi-flap PE to introduce recombinase recognition sequences at high-value loci in human or other genomes, which, after exposure to site-specific recombinase(s), will direct precise and efficient genomic modifications (FIG. 64). In various embodiments show in FIG. 64, PE may be used to (b) insert a single SSR target for use as a site for genomic integration of a DNA donor template. (c) shows how a tandem insertion of SSR target sites can be used to delete a portion of the genome. (d) shows how a tandem insertion of SSR target sites can be used to invert a portion of the genome. (e) shows how the insertion of two SSR target sites at two distal chromosomal regions can result in chromosomal translocation. (f) shows how the insertion of two different SSR target sites in the genome can be used to exchange a cassette from a DNA donor template. Each of the types of genome modifications are envisioned by using PE to insert SSR tagets, but this list also is not meant to be limiting.

[1014] Multi-flap PE-mediated introduction of recombinase recognition sequences could be particularly useful for the treatment of genetic diseases which are caused by large-scale genomic defects, such as gene loss, inversion, or duplication, or chromosomal translocation¹⁻⁷ (Table 6). For example, Williams-Beuren syndrome is a developmental disorder caused by a deletion of 24 in chromosome 721. No technology exists currently for the efficient and targeted insertion of multiple entire genes in living cells (the potential of PE to do such a full-length gene insertion is currently being explored but has not yet been established); however, recombinase-mediated integration at a target inserted by PE offers one approach towards a permanent cure for this and other diseases. In addition, targeted introduction of recombinase recognition sequences could be highly enabling for applications including generation of transgenic plants, animal research models, bioproduction cell lines, or other custom eukaryotic cell lines. For example, recombinase-mediated genomic rearrangement in transgenic plants at multi-flap PE-specific targets could overcome one of the bottlenecks to generating agricultural crops with improved properties^{8,9}.

TABLE 6
Examples of genetic diseases linked to large-scale
genomic modifications that could be repaired through
multi-flap PE-based installation of recombinase
recognition sequences.

| DISEASE | CAUSE |
|---|---|
| TRISOMY 17P | GENE DUPLICATION |
| CHARCOT-MARIE-TOOTH | GENE DUPLICATION |
| DISEASE TYPE I | |
| SMITH-MAGENIS | GENE DELETION |
| SYNDROME | |
| WILLIAMS-BEUREN | GENE DELETION |
| SYNDROME | |
| DE LA CHAPELLE | CHROMOSOMAL |
| SYNDROME | TRANSLOCATION |
| DOWN SYNDROME | CHROMOSOMAL |
| (SOME FORMS) | TRANSLOCATION |
| HEMOPHILIA A | GENE INVERSION |
| HUNTER SYNDROME | GENE INVERSION |

[1015] A number of SSR family members have been characterized and their recombinase recognition sequences described, including natural and engineered tyrosine recombinases (Table 7), large serine integrases (Table 8), serine resolvases (Table 9), and tyrosine integrases (Table 10). Modified target sequences that demonstrate enhanced rates of genomic integration have also been described for several SSRs²²⁻³³. In addition to natural recombinases, programmable recombinases with distinct specificities have been developed³¹⁻⁴⁰. Using PE, one or more of these recognition sequences could be introduced into the genomic at a specified location, such as a safe harbor locus⁴¹⁻⁴³, depending on the desired application.

[1016] For example, introduction of a single recombinase recognition sequence in the genome by prime editing would result in integrative recombination with a DNA donor template (FIG. 64b). Serine integrases, which operate robustly in human cells, may be especially well-suited for gene integration^{44,45}.

[1017] Additionally, introduction of two recombinase recognition sequences could result in deletion of the intervening sequence, inversion of the intervening sequence, chromosomal translocation, or cassette exchange, depending on the identity and orientation of the targets (FIG. 64c-f). By choosing endogenous sequences that already closely resemble recombinase targets, the scope of editing required to introduce the complete recombinase target would be reduced.

[1018] Finally, several recombinases have been demonstrated to integrate into human or eukaryotic genomes at natively occurring pseudosites^{46,64}. Multi-flap prime editing could be used to modify these loci to enhance rates of integration at these natural pseudosites, or alternatively, to eliminate pseudosites that may serve as unwanted off-target sequences.

[1019] This disclosure describes a general methodology for introducing recombinase target sequences in eukaryotic genomes using multi-flap PE, the applications of which are nearly limitless. The genome editing reactions are intended for use with “prime editors,” a chimeric fusion of a CRISPR/Cas9 protein and a reverse-transcriptase domain, which utilizes a custom prime editing guide RNA (PEgRNA). By extension, Cas9 tools and homology-directed repair (HDR) pathways may also be exploited to introduce recombinase recognition sequences through DNA templates by lowering the rates of indels using several techniques⁶⁵⁻⁶⁷. A proof-of-concept experiment in human cell culture is shown in FIG. 65. In some embodiments, the prime editors are multi-flap prime editors.

[1020] The following several tables are cited in the above description relating to PE-directed installation of recombinase recognition sequences and provide a listing of exemplary recombinases that may be used, and their cognate recombinase recognition sequences that may be installed by multi-flap PE.

TABLE 7
Tyrosine recombinases and SSR target sequences.

| Recombinase | Recombinase recognition sequence | Name |
|---|---|---|
| Cre | ATAACTTCGTATAGCATACATTATACGAAGTTAT (SEQ | loxP |
| | ID NO: 517) | |
| Dre | TAACTTTAAATAATGCCAATTATTTAAAGTTA (SEQ ID | rox |
| | NO: 518) | |
| VCre | TCAATTTCTGAGAACTGTCATTCTCGGAAATTGA (SEQ | loxV |
| | ID NO: 519) | |
| SCre | CTCGTGTCCGATAACTGTAATTATCGGACATGAT (SEQ | loxS |
| | ID NO: 520) | |
| Flp | GAAGTTCCTATTCTCTAGAAAGTATAGGAACTTC (SEQ | FRT |
| | ID NO: 521) | |
| B2 | GAGTTTCATTAAGGAATAACTAATTCCCTAATGAAACT | loxB |
| | C (SEQ ID NO: 522) | |
| B3 | GGTTGCTTAAGAATAAGTAATTCTTAAGCAACC (SEQ ID | loxB3 |
| | NO: 523) | |
| Kw | ACGAAAAATGGTAAGGAATAGACCATTCCTTACCATTT | |
| | TTGGT (SEQ ID NO: 524) | |
| R | TTGATGAAAGAATAACGTATTCTTTCATCAA (SEQ ID | RS |
| | NO: 525) | |
| TD1-40 | GTGCGTCAAATAATAACGTATTATTTGACACTT (SEQ ID | TDRS |
| | NO: 526) | |
| Vika | AATAGGTCTGAGAACGCCCATTCTCAGACGTATT (SEQ | vox |
| | ID NO: 527) | |
| Nigri | TGAATGTCCTATAATTACACTTATAGGACATTCA (SEQ | nox |
| | ID NO: 528) | |
| Panto | GAAACTTTAAATAATAAGTCTTATTTAAAGTTTC (SEQ | pox |
| | ID NO: 529) | |
| Kd | AAACGATATCAGACATTTGTCTGATAATGCTTCATTA | loxK |
| | TCAGACAAATGTCTGATATCGTTT (SEQ ID NO: 530) | |
| Fre | ATATATACGTATATAGACATATATACGTATATAT (SEQ | loxH |
| | ID NO: 531) | |
| CreALSHG | ATAACTCTATATAATGTATGCTATATAGAGTTAT (SEQ | loxM7 |
| | ID NO: 532) | |
| Tre | ACAACATCCTATTACACCCTATATGCCAACATGG (SEQ | loxLTR |
| | ID NO: 533) | |
| Brec1 | AACCCACTGCTTAAGCCTCAATAAAGCTTGCCTT (SEQ | loxBTR |
| | ID NO: 534) | |
| Cre-R3M3 | GATACAACGTATATACCTTTCTATACGTTGTTTA (SEQ | loxK2 |
| | ID NO: 535) | |

TABLE 8
Large serine integrases and SSR target sequences.

| | Recombinase recognition sequence | Recombinase recognition sequence |
|---|---|---|
| Recombinase | Left | Right |
| Bxb1 | GGTTTGTCTGGTCAACCACCGCGG | GGCTTGTCGACGACGGCGGTCTCCGTC |
| | TCTCAGTGGTGTACGGTACAAACC | GTCAGGATCAT (SEQ ID NO: 537) |
| | (SEQ ID NO: 536) | |
| phiC31 | GTGCCCCAACTGGGGTAACCTTTG | TGCGGGTGCCAGGGCGTGCCCTTGGG |
| | AGTTCTCTCAGTTGGGGG (SEQ ID | CTCCCCGGGCGCGTACTCC (SEQ ID |
| | NO: 538) | NO: 539) |
| R4 | TGTTCCCCAAAGCGATACCACTTG | GCATGTTCCCCAAAGCGATACCACTTG |
| | AAGCAGTGGTACTGCTTGTGGGT | AAGCAGTGGTACTGCTTGTGGGTACA |
| | ACA (SEQ ID NO: 540) | CTCTGCGGGTG (SEQ ID NO: 541) |
| phiBT1 | GGTGCTGGGTTGTTGTCTCTGGAC | CAGGTTTTTGACGAAAGTGATCCAGAT |
| | AGTGATCCATGGGAAACTACTCA | GATCCAG (SEQ ID NO: 543) |
| | GCACC (SEQ ID NO: 542) | |
| MJ1 (phiFC1) | ATTTTAGGTATATGATTTTGTTTAT | CAAAGGATCACTGAATCAAAAGTATT |
| | TAGTGTAAATAACACTATGTACCT | GCTCATCCACGCGAAA (SEQ ID NO: |
| | AAAAT (SEQ ID NO: 544) | 545) |
| MR11 | TTTGTGCGGAACTACGAACAGTTC | CGAAAATGTATGGAGGCACTTGTATC |
| | ATTAATACGAAGTGTACAAACTTC | AATATAGGATGTATACCTTCGAAGAC |
| | CATACAA (SEQ ID NO: 546) | ACTT (SEQ ID NO: 547) |
| TP901-1 | GAGTTTTTATTTCGTTTATTTCAAT | ATGCCAACACAATTAACATCTCAATCA |
| | TAAGGTAACTAAAAAACTCCTTTT | AGGTAAATGCTTTTTGCTTTTTTTGC |
| | AAGG (SEQ ID NO: 548) | (SEQ ID NO: 549) |
| A118 | TTCCTCGTTTTCTCTCGTTGGAAG | TTTCGGATCAAGCTATGAAGGACGCA |
| | AAGAAGAAACGAGAAA (SEQ ID | AAGAGGGAACTAAA(SEQ ID NO: 551) |
| | NO: 550) | |
| U153 | TTCCTCGTTTTCTCTCGTTGGACG | TTTCGGATCAAGCTATGAAGGACGCA |
| | GAAACGAATCGAGAAA (SEQ ID | AAGAGGGAACTAAA (SEQ ID NO: 553) |
| | NO: 552) | |
| phiRV1 | GTAGTGTATCTCACAGGTCCACGG | GAAGGTGTTGGTGCGGGGTTGGCCGT |
| | TTGGCCGTGGACTGCTGAAGAAC | GGTCGAGGTGGGGT (SEQ ID NO: 555) |
| | ATTCC (SEQ ID NO: 554) | |
| phi370.1 | AAAAAAATACAGCGTTTTTCATGT | TTGTAAAGGAGACTGATAATGGCATG |
| | ACAACTATACTAGTTGTAGTGCCT | TACAACTATACTCGTCGGTAAAAAGG |
| | AAAA (SEQ ID NO: 556) | CA (SEQ ID NO: 557) |
| TG1 | TCCAGCCCAACAGTGTTAGTCTTT | GATCAGCTCCGCGGGCAAGACCTTTCT |
| | GCTCTTACCCAGTTGGGCGGGA | CCTTCACGGGGTGGAAGGTC (SEQ ID |
| | (SEQ ID NO: 558) | NO: 559) |
| WB | CTAGTTTTAAAGTTGGTTATTAGT | CGGAAGGTAGCGTCAACGATAGGTGT |
| | TACTGTGATATTTATCACGGTACC | AACTGTCGTGTTTGTAACGGTACTTCC |
| | CAATAACCAATGAAT (SEQ ID NO: | AACAGCTGGCGCCGCCAC (SEQ ID NO: |
| | 560) | 561) |
| BL3 | CAATGAAAAACTAGGCATGTAGA | TTTCCACAGACAACTCACGTGGAGGT |
| | AGTTGTTTGT (SEQ ID NO: 562) | AGTCAC (SEQ ID NO: 563) |
| SprA | TGTAGTAAGTATCTTAATATACAG | CACCCATTGTGTTCACAGGAGATACA |
| | CTTTATCTGTTTTTTAAGATACTTA | GCTTTATCTGTACTGATATTAATGACA |
| | CTACTTT (SEQ ID NO: 564) | TGCTG (SEQ ID NO: 565) |
| phiJoe | AGTTGTGGCCATGTGTCCATCTGG | ATCTGGATGTGGGTGTCCATCTGCGGG |
| | GGGCAGATGGAGACGGGGTCACA | CAGACGCCGCAGTCGAAGCACGG |
| | (SEQ ID NO: 566) | (SEQ ID NO: 567) |
| — | — | ACCTTGATCTCGGTGTCCATCGCCGGG |
| | | CAGACGCCGCAGTCGAAGCACGG |
| | | (SEQ ID NO: 568) |
| phiK38 | CCCTAATACGCAAGTCGATAACTC | GAGCGCCGGATCAGGGAGTGGACGGC |
| | TCCTGGGAGCGTTGACAACTTGCG | CTGGGAGCGCTACACGCTGTGGCTGC |
| | CACCCTGATCTG (SEQ ID NO: 569) | GGTCGGTGC (SEQ ID NO: 570) |
| Int2 | GCTCATGTATGTGTCTACGCGAGA | GGACGGCGCAGAAGGGGAGTAGCTCT |
| | TTCTCGCCCGAGAACTTCTGCAAG | TCGCCGGACCGTCGACATACTGCTCAG |
| | GCACTGCTCTTGGCT (SEQ ID NO: | CTCGTC (SEQ ID NO: 572) |
| | 571) | |
| Int3 | ATGGATAAAAAAATACAGCGTTT | GTTTGTAAAGGAGACTGATAATGGCA |
| | TTCATGTACAACTATACTAGTTGT | TGTACAACTATACTCGTCGGTAAAAA |
| | AGTGCCTAAATAATGCTT (SEQ ID | GGCATCTTAT (SEQ ID NO: 574) |
| | NO: 573) | |
| Int4 | AAAAATTACAAAGTTTTCAACCCT | TTCCAAAGAGCGCCCAACGCGACCTG |
| | TGATTTGAATTAGCGGTCAAATAA | AAATTTGAATAAGACTGCTGCTTGTGT |
| | TTTGTAATTCGTTT (SEQ ID NO: | AAAGGCGATGATT (SEQ ID NO: 576) |
| | 575) | |
| Int7 | GTGTTATAAACCTGTGTGAGAGTT | AGACGAGAAACGTTCCGTCCGTCTGG |
| | AAGTTTACATGCCTAACCTTAACT | GTCAGTTGGGCAAAGTTGATGACCGG |
| | TTTACGCAGGTTCAGCTT(SEQ ID | GTCGTCCGTT (SEQ ID NO: 578) |
| | NO: 577) | |
| Int8 | TTAATAAACTATGGAAGTATGTAC | CAATCATCAGATAACTATGGCGGCAC |
| | AGTCTTGCAATGTTGAGTGAACA | GTGCATTAACCACGGTTGTATCCCGTC |
| | AACTTCCATAATAAAAT (SEQ ID | TAAAGTACTCGT (SEQ ID NO: 580) |
| | NO: 579) | |
| Int9 | GTGGTTGTTTTTGTTGGAAGTGTG | TTTATATTGCGAAAAATAATTGGCGAA |
| | TATCAGGTATCTGCATAGTTATTC | CGAGGTAACTGGATACCTCATCCGCC |
| | CGAACTTCCAATTA (SEQ ID NO: | AATTAAAATTTG (SEQ ID NO: 582) |
| | 581) | |
| Int10 | GGAAAATATAAATAATTTTAGTA | AGCACGCTGATAATCAGCAAGACCAC |
| | ACCTACATCTCAATCAAGGATAGT | CAACATTTCCACCAATGTAAAAGCTTT |
| | AAAACTCTCACTCTT (SEQ ID NO: | AACCTTAGC (SEQ ID NO: 584) |
| | 583) | |
| Int11 | GTTTATATGTTTACTAATAAGACG | ATGGATTTTGCAGATTCCCAGATGCCC |
| | CTCTCAACCCATAAAGTCTTATTA | CTACAGAAAGAGGTACAAAACATTTA |
| | GTAAACATATTTCAACT (SEQ ID | TTGGAATTAATT (SEQ ID NO: 586) |
| | NO: 585) | |
| Int12 | TTTTTGTATGTTAGTTGTGTCACTG | GTTCGTGGTAACTATGGGTGGTACAG |
| | GGTAGACCTAAATAGTGACACAA | GTGCCACATTAGTTGTACCATTTATGT |
| | CTGCTATTAAAATTTAA (SEQ ID | TTATGTGGTTAAC (SEQ ID NO: 588) |
| | NO: 587) | |
| Int13 | CAATAACGGTTGTATTTGTAGAAC | GCATACATTGTTGTTGTTTTTCCAGAT |
| | TTGACCAGTTGTTTTAGTAACATA | CCAGTTGGTCCTGTAAATATAAGCAAT |
| | AATACAACTCCGAATA (SEQ ID | CCATGTGAGT (SEQ ID NO: 590) |
| | NO: 589) | |
| LI | GTTTAGTATCTCGTTATCTCTCGTT | TAACTTTTTCGGATCGAGTTATGATGG |
| | GGAGGGAGAAGAAACGGGATACC | ACGTAAAGAGGGAACAAAGCATCTA |
| | AAAA (SEQ ID NO: 591) | (SEQ ID NO: 592) |
| Peaches | TAGTTTCCAATGTTACAGGAACTG | CGGTCTCCATCGGGATCTGCTGATCGA |
| | CTGGCAGAATCCAACACATTGGA | GCAGCATGCCGACCA (SEQ ID NO: 594) |
| | AGTCG (SEQ ID NO: 593) | |
| Bxz2 | TAACCGCAAGTGTACATCCCTCGG | CGGTCTCCATCGGGATCTGCTGATCGA |
| | CTGGCCGAGACAAGTACAGTTGC | GCAGCATGCCGACCA (SEQ ID NO: 596) |
| | GACAG (SEQ ID NO: 595) | |
| SV1 | ATGTGGTCCTTTAGATCCACTGAC | CATCAGGGCGGTCAGGCCGTAGATGT |
| | GTGGGTCAGTGTCTCTAAAGGACT | GGAAGAAACGGCAGCACGGCGAGGA |
| | CGCG (SEQ ID NO: 597) | CG (SEQ ID NO: 598) |

TABLE 9
Serine resolvases and SSR target sequences.

| | Recombinase recognition sequence | Recombinase recognition sequence |
|---|---|---|
| Resolvase | Left | Right |
| Gin | CGTTTCCTGTAAACCGAGGTTTTGGA | CGTTTCCTGTAAACCGAGGTTTTGGA |
| | TAAACA (SEQ ID NO: 599) | TAATGG (SEQ ID NO: 600) |
| Cin | GAGTTCTCTTAAACCAAGGTTTAGG | GAGTTCTCTTAAACCAAGGTATTGG |
| | ATTGAAA (SEQ ID NO: 601) | ATAACAG (SEQ ID NO: 602) |
| Hin | TGGTTCTTGAAAACCAAGGTTTTTGA | AAATTTTCCTTTTTGGAAGGTTTTTG |
| | TAAAGC (SEQ ID NO: 603) | ATAACCA (SEQ ID NO: 604) |
| Min | GCCTTCCCCTAAACCAACGTTTTTAT | GCCTTCCCCCAAACCAAGGTAATCA |
| | GCCGCC (SEQ ID NO: 605) | AGAACGC (SEQ ID NO: 606) |
| Sin | TTGTGAAATTTGGGTACACCCTAATC | CGTATGATTAGGGTGTATATTAATTT |
| | ATACAA (SEQ ID NO: 607) | (SEQ ID NO: 608) |

TABLE 10
Tyrosine integrases and target sequences.

| Integrase | attP | attB |
|---|---|---|
| HK022 | CAAATGATTTTATTTTGACTAATAATGA | GCACTTTAGGTGAAAAAGGTT |
| | CCTACTTACATTAATTTACTGATAATTA | (SEQ ID NO: 610) |
| | AAGAGATTTTAAATATACAACTTATTC | |
| | ACCTAAAGGATGACAAAA (SEQ ID NO: | |
| | 609) | |
| | TAACATTAATCACTTAAAAATCATCGC | |
| | ATTACACTAATCTGTGGTTAAATGATA | |
| | GACTACATAATGCGACAAAACGCAACA | |
| | TATCCAGTCACTATGAATCAACTACTT | |
| | AGATAGTATTAGTGACCT (SEQ ID NO: | |
| | 611) | |
| P22 | CTAAGTGGTTTGGGACAAAAATGGGAC | GCAGCGCATTCGTAATGCGAAG |
| | ATACAAATCTTTGCATCGGTTTGCAAG | GTCGT (SEQ ID NO: 613) |
| | GCTTTGCATGTCTTTCGAAGATGGGAC | |
| | GTGTGAGCGCAGGTATGACGTGGTATG | |
| | TGTTGACTTAAAAGGTAGTTCTTATAAT | |
| | TCGTAATGCGAAGGTCGTAGGTTCGAC | |
| | TCCTATTATCGGCACCAGTTAAATCAA | |
| | ATACTTACGTATTATTCGTGCCTTCCTT | |
| | ATTTTTACTGTGGGACATATTTGGGACA | |
| | GAAGTACCAAAAA (SEQ ID NO: 612) | |
| L5 | GCGATCCCCATCCGCGACGTGCCAACT | GAGCGGGCGACGGGAATCGAA |
| | AGGTCTCCTCTCGTCGTGAACAAGGCT | CCCGCGTAGCTAGTTTGGAAGA |
| | ACCGGGTTGCAACTCCTGTGCAACTCT | (SEQ ID NO: 615) |
| | CAGGCTTCAACGCGCTTCTACGACCTG | |
| | CAATTTCTTTCCACTTAGAGGATGCAG | |
| | CCGAGAGGGGTAAAAACCTATCTTGAC | |
| | CGGCCCATATGTGGTCGGCAGACACCC | |
| | ATTCTTCCAAACTAGCTACGCGGGTTC | |
| | GATTCCCGTCGCCCGCTCCGCTGGTCA | |
| | GAGGGTGTTTTCGCCCTCTGGCCATTTT | |
| | TCTTTCCAGGGGTCTGCAACTCTTGTGC | |
| | GACTCTTCTGACCTGGGCATACGCGGT | |
| | TGCAACGCATCCCTGATCTGGCTACTTT | |
| | CGATGCTGACAAACGAATAGAGCCCCC | |
| | CGCCTGCGCGAACAGACGAGGGGCATT | |
| | CACA (SEQ ID NO: 614) | |

[1021] In various other aspects, the present disclosure relates to methods of using multi-flap PE to install one or more recombinase recognition sequences and their use in site-specific recombination.

[1022] In some embodiments, the site-specific recombination may effecuate a variety of recombination outcomes, such as, excision, integration, inversion, or exhange of DNA fragments.

[1023] In some embodiments, the methods are useful for inducing recombination of or between two or more regions of two or more nucleic acid (e.g., DNA) molecules. In other embodiments, the methods are useful for inducing recombination of or between two or more regions in a single nucleic acid molecule (e.g., DNA).

[1024] In some embodiments, the disclosure provides a method for integrating a donor DNA template by site-specific recombination, comprising: (a) installing a recombinase recognition sequence at a genomic locus by multi-flap prime editing; (b) contacting the genomic locus with a DNA donor template that also comprises the recombinase recognition sequence in the presence of a recombinase.

[1025] In other embodiments, the disclosure provides a method for deleting a genomic region by site-specific recombination, comprising: (a) installing a pair of recombinase recognition sequences at a genomic locus by multi-flap prime editing; (b) contacting the genomic locus with a recombinase, thereby catalyzing the deletion of the genomic region between the pair of recombinase recognition sequences.

[1026] In yet other embodiments, the disclosure provides a method for inverting a genomic region by site-specific recombination, comprising: (a) installing a pair of recombinase recognition sequences at a genomic locus by multi-flap prime editing; (b) contacting the genomic locus with a recombinase, thereby catalyzing the inversion of the genomic region between the pair of recombinase recognition sequences.

[1027] In still other embodiments, the disclosure provides a method for inducing chromosomal translocation between a first genomic site and a second genomic site, comprising: (a) installing a first recombinase recognition sequence at a first genomic locus by prime editing; (b) installing a second recombinase recognition sequence at a second genomic locus by multi-flap prime editing; (c) contacting the first and the second genomic loci with a recombinase, thereby catalyzing the chromosomal translocation of the first and second genomic loci.

[1028] In other embodiments, the disclosure provides a method for inducing cassette exchange between a genomic locus and a donor DNA comprising a cassette, comprising: (a) installing a first recombinase recognition sequence at a first genomic locus by multi-flap prime editing; (b) installing a second recombinase recognition sequence at a second genomic locus by multi-flap prime editing; (c) contacting the first and the second genomic loci with a donor DNA comprising a cassette that is flanked by the first and scond recombinase recognition sequences and a recombinase, thereby catalyzing the exchange of the flanked genomic locus and the cassette in the DNA donor.

[1029] In various embodiments involving the insertion of more than one recombinase recognition sequences in the genome, the recombinase recognition sequences can be the same or different. In some embodiments, the recombinase recognition sequences are the same. In other embodiments, that recombinase recognition sequences are different.

[1030] In various embodiments, the recombinase can be a tyrosine recombinase, such as Cre, Dre, Vcre, Scre, Flp, B2, B3, Kw, R, TD1-40, Vika, Nigri, Panto, Kd, Fre, Cre(ALSHG), Tre, Brec1, or Cre-R3M3, as shown in Table 7. In such embodiments, the recombinase recognition sequence may be an RRS of Table 7 that corresponds to the recombinase under use.

[1031] In various other embodiments, the recombinase can be a large serine recombinase, such as Bxb1, PhiC31, R4, phiBT1, MJ1, MR11, TP901-1, A118, V153, phiRV1, phi370.1, TG1, WB, BL3, SprA, phiJoe, phiK38, Int2, Int3, Int4, Int7, Int8, Int9, Int10, Int11, Int12, Int13, L1, peaches, Bxz2, or SV1, as shown in Table 8. In such embodiments, the recombinase recognition sequence may be an RRS of Table 8 that corresponds to the recombinase under use.

[1032] In still other embodiments, the recombinase can be a serine recombinase, such as Bxb1, PhiC31, R4, phiBT1, MJ1, MR11, TP901-1, A118, V153, phiRV1, phi370.1, TG1, WB, BL3, SprA, phiJoe, phiK38, Int2, Int3, Int4, Int7, Int8, Int9, Int10, Int11, Int12, Int13, L1, peaches, Bxz2, or SV1, as shown in Table 8. In such embodiments, the recombinase recognition sequence may be an RRS of Table 8 that corresponds to the recombinase under use.

[1033] In other embodiments, the recombinase can be a serine resolvase, such as Gin, Cin, Hin, Min, or Sin, as shown in Table 9. In such embodiments, the recombinase recognition sequence may be an RRS of Table 9 that corresponds to the recombinase under use.

[1034] In various other embodiments, the recombinase can be a tyrosine integrase, such as HK022, P22, or L5, as shown in Table 10. In such embodiments, the recombinase recognition sequence may be an RRS of Table 10 that corresponds to the recombinase under use.

[1035] In some embodiments, any of the methods for site-specific recombination with multi-flap PE can be performed in vivo or in vitro. In some embodiments, any of the methods for site-specific recombination are performed in a cell (e.g., recombine genomic DNA in a cell). The cell can be prokaryotic or eukaryotic. The cell, such as a eukaryotic cell, can be in an individual, such as a subject, as described herein (e.g., a human subject). The methods described herein are useful for the genetic modification of cells in vitro and in vivo, for example, in the context of the generation of transgenic cells, cell lines, or animals, or in the alteration of genomic sequence, e.g., the correction of a genetic defect, in a cell in a subject.

[8] Embodiments of the multi-flap prime editors described herein

[1036] The following non-limiting embodiments describe aspects of the dual prime editors and their use as described in this application.
[1037] 1. A system for simultaneously editing both strands of a double-stranded DNA sequence at a target site to be edited, wherein the system comprises a first prime editor complex and a second prime editor complex, wherein each of the first and second prime editor complexes comprises (1) a prime editor comprising (i) a nucleic acid programmable DNA binding protein (napDNAbp), and (ii) a polypeptide having an RNA-dependent DNA polymerase activity; and (2) a pegRNA comprising a spacer sequence, gRNA core, a DNA synthesis template, and a primer binding site, wherein the DNA synthesis template of the pegRNA of the first prime editor complex encodes a first single-stranded DNA sequence and the DNA synthesis template of the pegRNA of the second prime editor complex encodes a second single-stranded DNA sequence, wherein the first single-stranded DNA sequence and the second single-stranded DNA sequence each comprises a region of complementarity to the other, and wherein the first single-stranded DNA sequence and the second single-stranded DNA sequence form a duplex comprising an edited portion as compared to the DNA sequence at the target site to be edited, which integrates into the target site to be edited.
[1038] 2. The system of embodiment 1, wherein the prime editor of the first prime editor complex, the second prime editor complex, or both the first prime editor complex and the second prime editor complex is a fusion protein comprising the napDNAbp and the polypeptide having an RNA-dependent DNA polymerase activity.
[1039] 3. The system of embodiment 1 or 2, wherein the first prime editor complex and the second prime editor complex comprise the same prime editor.
[1040] 4. The system of embodiment 1 or 2, wherein the first prime editor complex and the second prime editor complex comprise different prime editors.
[1041] 5. The system of any one of embodiments 1-4, wherein the napDNAbp is a Cas9 domain or variant thereof.
[1042] 6. The system of any one of embodiments 1-5, wherein the napDNAbp is a nuclease active Cas9 domain, a nuclease inactive Cas9 domain, a Cas9 nickase domain, or variant thereof.
[1043] 7. The system of any one of embodiments 1-4, wherein the napDNAbp is selected from the group consisting of: Cas9, Cas12e, Cas12d, Cas12a, Cas12b1, Cas13a, Cas12c, CasX, CasY, and Argonaute.
[1044] 8. The system of any one of embodiments 1-7, wherein the napDNAbp has a nickase activity.
[1045] 9. The system of any one of embodiments 1-4, wherein the napDNAbp comprises an amino acid sequence of any one of SEQ ID NOs: 18-88, or an amino acid sequence having at least an 80%, 85%, 90%, 95%, or 99% sequence identity with any one of SEQ ID NOs: 18-88.
[1046] 10. The system of any one of embodiments 1-9, wherein the polypeptide having an RNA-dependent DNA polymerase activity is a reverse transcriptase.
[1047] 11. The system of any one of embodiments 1-10, wherein the polypeptide having an RNA-dependent DNA polymerase activity comprises an amino acid sequence of any one of SEQ ID NOs: 89-100, 105-122, 128-129, 132, 139, 143, 149, 154, 159, and 700-766 or an amino acid sequence having at least an 80%, 85%, 90%, 95%, or 99% sequence identity with any one of SEQ ID NOs: 89-100, 105-122, 128-129, and 132.
[1048] 12. The system of any one of embodiments 1-11, wherein the prime editor further comprises a linker that joins the napDNAbp and the polypeptide having the RNA-dependent DNA polymerase activity.
[1049] 13. The system of embodiment 12, wherein the linker comprises an amino acid sequence of any one of SEQ ID NOs: 166-177, or an amino acid sequence having at least an 80%, 85%, 90%, 95%, or 99% sequence identity with any one of SEQ ID NOs: 166-177.
[1050] 14. The system of embodiment 12 or 13, wherein the linker is 1, 2, 3, 4, 5, 6, 7, 8, 9, 10, 11, 12, 13, 14, 15, 16, 17, 18, 19, 20, 21, 22, 23, 24, 25, 26, 27, 28, 29, 30, 31, 32, 33, 34, 35, 36, 38, 38, 39, 40, 41, 42, 43, 44, 45, 46, 47, 48, 49, or 50 amino acids in length.
[1051] 15. The system of any one of embodiments 1-14, wherein the pegRNA comprises a nucleotide sequence of any one of SEQ ID NOs: 325-330, 499-505, 101-104, 181-183, and 223-244, or a nucleotide sequence having at least an 80%, 85%, 90%, 95%, or 99% sequence identity with any one of SEQ ID NOs: 325-330, 499-505, 101-104, 181-183, and 223-244.
[1052] 16. The system of any one of embodiments 1-15, wherein the spacer sequence of the pegRNA of the first prime editor complex binds to a first binding site on a first strand of the double-stranded DNA sequence upstream from the target site to be edited.
[1053] 17. The system of any one of embodiments 1-16, wherein the spacer sequence of the pegRNA of the second prime editor complex binds to a second binding site on a second strand of the double-stranded DNA sequence downstream from the target site to be edited.
[1054] 18. The system of embodiment 17, whereby the binding of the spacer sequence of the pegRNAs of the first and second prime editor complexes in the presence of a PAM sequence results in the nicking of the first and second strands, respectively, at a nick site proximal to the PAM sequences on each strand by the napDNAbps of each of the first and second prime editor complex.
[1055] 19. The system of embodiment 18, wherein the first and second binding sites define two ends of a contiguous region of double-stranded DNA comprising the target site to be edited.
[1056] 20. The system of embodiment 19, wherein the contiguous region between the first and second binding sites is at least 10 nucleobase pairs, at least 11 nucleobase pairs, at least 12 nucleobase pairs, at least 13 nucleobase pairs, at least 14 nucleobase pairs, at least 15 nucleobase pairs, at least 16 nucleobase pairs, at least 17 nucleobase pairs, at least 18 nucleobase pairs, at least 19 nucleobase pairs, at least 20 nucleobase pairs, at least 21 nucleobase pairs, at least 22 nucleobase pairs, at least 23 nucleobase pairs, at least 24 nucleobase pairs, at least 25 nucleobase pairs, at least 26 nucleobase pairs, at least 27 nucleobase pairs, at least 28 nucleobase pairs, at least 29 nucleobase pairs, at least 30 nucleobase pairs, at least 31 nucleobase pairs, at least 32 nucleobase pairs, at least 33 nucleobase pairs, at least 34 nucleobase pairs, at least 35 nucleobase pairs, at least 36 nucleobase pairs, at least 37 nucleobase pairs, at least 37 nucleobase pairs, at least 38 nucleobase pairs, at least 39 nucleobase pairs, or at least 40 nucleobase pairs, at least 41 nucleotides, at least 42 nucleotides, at least 43 nucleotides, at least 44 nucleotides, at least 45 nucleotides, at least 46 nucleotides, at least 47 nucleotides, at least 48 nucleotides, at least 49 nucleotides, at least 50 nucleotides, at least 51 nucleotides, at least 52 nucleotides, at least 53 nucleotides, at least 54 nucleotides, at least 55 nucleotides, at least 56 nucleotides, at least 57 nucleotides, at least 58 nucleotides, at least 59 nucleotides, at least 60 nucleotides, at least 61 nucleotides, at least 62 nucleotides, at least 63 nucleotides, at least 64 nucleotides, at least 65 nucleotides, at least 66 nucleotides, at least 67 nucleotides, at least 68 nucleotides, at least 69 nucleotides, at least 70 nucleotides, at least 71 nucleotides, at least 72 nucleotides, at least 73 nucleotides, at least 74 nucleotides, at least 75 nucleotides, at least 76 nucleotides, at least 77 nucleotides, at least 78 nucleotides, at least 79 nucleotides, at least 80 nucleotides, at least 81 nucleotides, at least 82 nucleotides, at least 83 nucleotides, at least 84 nucleotides, at least 85 nucleotides, at least 86 nucleotides, at least 87 nucleotides, at least 88 nucleotides, at least 89 nucleotides, at least 90 nucleotides, at least 91 nucleotides, at least 92 nucleotides, at least 93 nucleotides, at least 94 nucleotide at least 95 nucleotides, at least 96 nucleotides, at least 97 nucleotides, at least 98 nucleotides, at least 99 nucleotides, at least 100 nucleotides, at least 101 nucleotides, at least 102 nucleotides, at least 103 nucleotides, at least 104 nucleotides, at least 105 nucleotides, at least 106 nucleotides, at least 107 nucleotides, at least 108 nucleotides, at least 109 nucleotides, or at least 110 nucleotides in length.
[1057] 21. The system of embodiment 19, wherein the contiguous region becomes replaced by the duplex comprising the edited portion.
[1058] 22. The system of any one of embodiments 1-21, wherein the DNA synthesis template is at least 1 nucleotide, at least 2 nucleotides, at least 3 nucleotides, at least 4 nucleotides, at least 5 nucleotides, at least 6 nucleotides, at least 7 nucleotides, at least 8 nucleotides, at least 9 nucleotides, at least 10 nucleotides, at least 11 nucleotides, at least 12 nucleotides, at least 13 nucleotides, at least 14 nucleotides, at least 15 nucleotides, at least 16 nucleotides, at least 17 nucleotides, at least 18 nucleotides, at least 19 nucleotides, at least 20 nucleotides, at least 21 nucleotides, at least 22 nucleotides, at least 23 nucleotides, at least 24 nucleotides, at least 25 nucleotides, at least 26 nucleotides, at least 27 nucleotides, at least 28 nucleotides, at least 29 nucleotides, at least 30 nucleotides, at least 31 nucleotides, at least 32 nucleotides, at least 33 nucleotides, at least 34 nucleotides, at least 35 nucleotides, at least 36 nucleotides, at least 37 nucleotides, at least 38 nucleotides, at least 39 nucleotides, at least 40 nucleotides, at least 41 nucleotides, at least 42 nucleotides, at least 43 nucleotides, at least 44 nucleotides, at least 45 nucleotides, at least 46 nucleotides, at least 47 nucleotides, at least 48 nucleotides, at least 49 nucleotides, at least 50 nucleotides, at least 51 nucleotides, at least 52 nucleotides, at least 53 nucleotides, at least 54 nucleotides, at least 55 nucleotides, at least 56 nucleotides, at least 57 nucleotides, at least 58 nucleotides, at least 59 nucleotides, at least 60 nucleotides, at least 61 nucleotides, at least 62 nucleotides, at least 63 nucleotides, at least 64 nucleotides, at least 65 nucleotides, at least 66 nucleotides, at least 67 nucleotides, at least 68 nucleotides, at least 69 nucleotides, at least 70 nucleotides, at least 71 nucleotides, at least 72 nucleotides, at least 73 nucleotides, at least 74 nucleotides, at least 75 nucleotides, at least 76 nucleotides, at least 77 nucleotides, at least 78 nucleotides, at least 79 nucleotides, at least 80 nucleotides, at least 81 nucleotides, at least 82 nucleotides, at least 83 nucleotides, at least 84 nucleotides, at least 85 nucleotides, at least 86 nucleotides, at least 87 nucleotides, at least 88 nucleotides, at least 89 nucleotides, at least 90 nucleotides, at least 91 nucleotides, at least 92 nucleotides, at least 93 nucleotides, at least 94 nucleotide at least 95 nucleotides, at least 96 nucleotides, at least 97 nucleotides, at least 98 nucleotides, at least 99 nucleotides, at least 100 nucleotides, at least 101 nucleotides, at least 102 nucleotides, at least 103 nucleotides, at least 104 nucleotides, at least 105 nucleotides, at least 106 nucleotides, at least 107 nucleotides, at least 108 nucleotides, at least 109 nucleotides, or at least 110 nucleotides in length.
[1059] 23. The system of any one of embodiments 1-22, wherein the first single-stranded DNA sequence and the second single-stranded DNA sequence have the same lengths.
[1060] 24. The system of any one of embodiments 1-22, wherein the first single-stranded DNA sequence and the second single-stranded DNA sequence have different lengths.
[1061] 25. The system of any one of embodiments 1-24, wherein the region of complementarity is at least 99%, at least 95%, at least 90%, at least 85%, at least 80%, at least 75%, at least 70%, at least 65%, at least 60%, at least 55%, at least 50%, at least 45%, at least 40%, at least 35%, at least 30%, at least 25%, at least 20%, at least 15%, or at least 10% of the total length of the first single-stranded DNA sequence or the second single-stranded DNA sequence.
[1062] 26. The system of embodiment 25, wherein the region of complementarity is at least 5 nucleotides, at least 6 nucleotides, at least 7 nucleotides, at least 8 nucleotides, at least 9 nucleotides, at least 10 nucleotides, at least 11 nucleotides, at least 12 nucleotides, at least 13 nucleotides, at least 14 nucleotides, at least 15 nucleotides, at least 16 nucleotides, at least 17 nucleotides, at least 18 nucleotides, at least 19 nucleotides, at least 20 nucleotides, at least 21 nucleotides, at least 22 nucleotides, at least 23 nucleotides, at least 24 nucleotides, at least 25 nucleotides, at least 26 nucleotides, at least 27 nucleotides, at least 28 nucleotides, at least 29 nucleotides, at least 30 nucleotides, at least 31 nucleotides, at least 32 nucleotides, at least 33 nucleotides, at least 34 nucleotides, at least 35 nucleotides, at least 36 nucleotides, at least 37 nucleotides, at least 38 nucleotides, at least 39 nucleotides, at least 40 nucleotides, at least 41 nucleotides, at least 42 nucleotides, at least 43 nucleotides, at least 44 nucleotides, at least 45 nucleotides, at least 46 nucleotides, at least 47 nucleotides, at least 48 nucleotides, at least 49 nucleotides, at least 50 nucleotides, at least 51 nucleotides, at least 52 nucleotides, at least 53 nucleotides, at least 54 nucleotides, at least 55 nucleotides, at least 56 nucleotides, at least 57 nucleotides, at least 58 nucleotides, at least 59 nucleotides, at least 60 nucleotides, at least 61 nucleotides, at least 62 nucleotides, at least 63 nucleotides, at least 64 nucleotides, at least 65 nucleotides, at least 66 nucleotides, at least 67 nucleotides, at least 68 nucleotides, at least 69 nucleotides, at least 70 nucleotides, at least 71 nucleotides, at least 72 nucleotides, at least 73 nucleotides, at least 74 nucleotides, at least 75 nucleotides, at least 76 nucleotides, at least 77 nucleotides, at least 78 nucleotides, at least 79 nucleotides, at least 80 nucleotides, at least 81 nucleotides, at least 82 nucleotides, at least 83 nucleotides, at least 84 nucleotides, at least 85 nucleotides, at least 86 nucleotides, at least 87 nucleotides, at least 88 nucleotides, at least 89 nucleotides, at least 90 nucleotides, at least 91 nucleotides, at least 92 nucleotides, at least 93 nucleotides, at least 94 nucleotide at least 95 nucleotides, at least 96 nucleotides, at least 97 nucleotides, at least 98 nucleotides, at least 99 nucleotides, at least 100 nucleotides, at least 101 nucleotides, at least 102 nucleotides, at least 103 nucleotides, at least 104 nucleotides, at least 105 nucleotides, at least 106 nucleotides, at least 107 nucleotides, at least 108 nucleotides, at least 109 nucleotides, or at least 110 nucleotides in length, and is either less than or equal to the length of the desired DNA sequence and complement thereof.
[1063] 27. The system of embodiment 25, wherein the region of complementarity of the first single-stranded DNA sequence and the second single-stranded DNA sequence form the duplex comprising the edited portion.
[1064] 28. The system of any one of embodiments 1-27, wherein the first single-stranded DNA sequence and the second single-stranded DNA sequence are each single-stranded DNA strands having 3′ ends.
[1065] 29. The system of embodiment 21, wherein the replacement of the contiguous region by the duplex comprising the edited portion results in an insertion, deletion, or replacement of DNA at the target site.
[1066] 30. A system for simultaneously editing both strands of a double-stranded DNA sequence at a target site to be edited, said system comprising:
[1067] (a) a first prime editor complex comprising:
   [1068] i. a first prime editor comprising a first nucleic acid programmable DNA binding protein (first napDNAbp) and a first polypeptide comprising an RNA-dependent DNA polymerase activity; and
   [1069] ii. a first prime editing guide RNA (first PEgRNA) that binds to a first binding site on a first strand of the double-stranded DNA sequence upstream of the target site to be edited;
[1070] (b) a second prime editor complex comprising:
   [1071] i. a second prime editor comprising a second nucleic acid programmable DNA binding protein (second napDNAbp) and a second polypeptide comprising an RNA-dependent DNA polymerase activity; and
   [1072] ii. a second prime editing guide RNA (second PEgRNA) that binds to a second binding site on a second strand of the double-stranded DNA sequence downstream of the target site to be edited;
   [1073] wherein the first PEgRNA comprises a first DNA synthesis template encoding a first single-stranded DNA sequence and the second PEgRNA comprises a second DNA synthesis template encoding a second single-stranded DNA sequence, and wherein the first strand and the second strand of the double-stranded DNA sequence are complementary to each other.
[1074] 31. The system of embodiment 30, wherein the prime editor of the first prime editor complex, the second prime editor complex, or both the first prime editor complex and the second prime editor complex is a fusion protein comprising the napDNAbp and the polypeptide having an RNA-dependent DNA polymerase activity.
[1075] 32. The system of embodiment 30, wherein the first and the second single-stranded DNA sequence each comprise a region of complementarity to the other.
[1076] 33. The system of embodiment 30, wherein the first single-stranded DNA sequence and the second single-stranded DNA sequence form a duplex comprising the edited portion which integrates into the target site to be edited.
[1077] 34. The system of embodiment 30, wherein the first single-tranded DNA sequence and/or the second single stranded sequence does not comprise sequence homology as compared to the DNA sequence at the target site.
[1078] 35. The system of embodiment 30, wherein the first PEgRNA further comprises a first spacer sequence, a first gRNA core, and a first primer binding site, and the second PEgRNA further comprises a second spacer sequence, a second gRNA core, and a second primer binding site.
[1079] 36. The system of any one of embodiments 30-35, wherein the first prime editor complex and the second prime editor complex comprise the same prime editor.
[1080] 37. The system of any one of embodiments 30-35, wherein the first polypeptide comprising an RNA-dependent DNA polymerase activity and the second polypeptide comprising an RNA-dependent DNA polymerase activity are the same.
[1081] 38. The system of any one of embodiments 30-37, wherein the first and/or second napDNAbp is a Cas9 domain or variant thereof.
[1082] 39. The system of any one of embodiments 30-38, wherein the first and/or second napDNAbp is a nuclease active Cas9 domain, a nuclease inactive Cas9 domain, a Cas9 nickase domain, or a variant thereof.
[1083] 40. The system of any one of embodiments 30-39, wherein the first and/or second napDNAbp is selected from the group consisting of Cas9, Cas12e, Cas12d, Cas12a, Cas12b1, Cas13a, Cas12c, CasX, CasY, and Argonaute.
[1084] 41. The system of any one of embodiments 30-40, wherein the napDNAbp has a nickase activity.
[1085] 42. The system of any one of embodiments 30-41, wherein the first and/or second napDNAbp comprises an amino acid sequence of any one of SEQ ID NOs: 18-88, or an amino acid sequence having at least an 80%, 85%, 90%, 95%, or 99% sequence identity with any one of SEQ ID NOs: 18-88.
[1086] 43. The system of any one of embodiments 30-42, wherein the first and/or second polypeptide having an RNA-dependent DNA polymerase activity is a reverse transcriptase.
[1087] 44. The system of any one of embodiments 30-43, wherein the first and/or second polypeptide having an RNA-dependent DNA polymerase activity comprises an amino acid sequence of any one of SEQ ID NOs: 89-100, 105-122, 128-129, 132, 139, 143, 149, 154, 159, and 700-766 or an amino acid sequence having at least an 80%, 85%, 90%, 95%, or 99% sequence identity with any one of SEQ ID NOs: 89-100, 105-122, 128-129, and 132.
[1088] 45. The system of any one of embodiments 30-44, wherein the first prime editor further comprises a linker that joins the first napDNAbp and the first polypeptide having the RNA-dependent DNA polymerase activity; and/or the second prime editor further comprises a linker that joins the second napDNAbp and the second polypeptide having the RNA-dependent DNA polymerase activity.
[1089] 46. The system of embodiment 45, wherein the linker comprises an amino acid sequence of any one of SEQ ID NOs: 166-177, or an amino acid sequence having at least an 80%, 85%, 90%, 95%, or 99% sequence identity with any one of SEQ ID NOs: 166-177.
[1090] 47. The system of embodiment 45 or 46, wherein the linker is 1, 2, 3, 4, 5, 6, 7, 8, 9, 10, 11, 12, 13, 14, 15, 16, 17, 18, 19, 20, 21, 22, 23, 24, 25, 26, 27, 28, 29, 30, 31, 32, 33, 34, 35, 36, 38, 38, 39, 40, 41, 42, 43, 44, 45, 46, 47, 48, 49, or 50 amino acid in length.
[1091] 48. The system of any one of embodiments 30-47, wherein the first and/or second pegRNA comprises a nucleotide sequence of any one of SEQ ID NOs: 325-330, 499-505, 101-104, 181-183, and 223-244, or a nucleotide sequence having at least an 80%, 85%, 90%, 95%, or 99% sequence identity with any one of SEQ ID NOs: 325-330, 499-505, 101-104, 181-183, and 223-244.
[1092] 49. The system of any one of embodiments 30-48, wherein the first spacer sequence binds to a first binding site on a first strand of the double-stranded DNA sequence upstream from the target site to be edited.
[1093] 50. The system of embodiment 49, wherein the second spacer sequence of the second prime editor complex binds to a second binding site on a second strand of the double-stranded DNA sequence downstream from the target site to be edited.
[1094] 51. The system of embodiment 50, whereby the binding of the spacer sequence of the first and second prime editor complexes in the presence of a PAM sequence results in the nicking of the first and second strands, respectively, at a nick site proximal to the PAM sequences on each strand by the first and/or second napDNAbps of each of the first and second prime editor complexes.
[1095] 52. The system of embodiment 51, wherein the first and second binding sites define two ends of a contiguous region of double-stranded DNA comprising the target site to be edited.
[1096] 53. The system of embodiment 52, wherein the contiguous region between the first and second binding sites is least 10 nucleobase pairs, at least 11 nucleobase pairs, at least 12 nucleobase pairs, at least 13 nucleobase pairs, at least 14 nucleobase pairs, at least 15 nucleobase pairs, at least 16 nucleobase pairs, at least 17 nucleobase pairs, at least 18 nucleobase pairs, at least 19 nucleobase pairs, at least 20 nucleobase pairs, at least 21 nucleobase pairs, at least 22 nucleobase pairs, at least 23 nucleobase pairs, at least 24 nucleobase pairs, at least 25 nucleobase pairs, at least 26 nucleobase pairs, at least 27 nucleobase pairs, at least 28 nucleobase pairs, at least 29 nucleobase pairs, at least 30 nucleobase pairs, at least 31 nucleobase pairs, at least 32 nucleobase pairs, at least 33 nucleobase pairs, at least 34 nucleobase pairs, at least 35 nucleobase pairs, at least 36 nucleobase pairs, at least 37 nucleobase pairs, at least 37 nucleobase pairs, at least 38 nucleobase pairs, at least 39 nucleobase pairs, or at least 40 nucleobase pairs, at least 41 nucleotides, at least 42 nucleotides, at least 43 nucleotides, at least 44 nucleotides, at least 45 nucleotides, at least 46 nucleotides, at least 47 nucleotides, at least 48 nucleotides, at least 49 nucleotides, at least 50 nucleotides, at least 51 nucleotides, at least 52 nucleotides, at least 53 nucleotides, at least 54 nucleotides, at least 55 nucleotides, at least 56 nucleotides, at least 57 nucleotides, at least 58 nucleotides, at least 59 nucleotides, at least 60 nucleotides, at least 61 nucleotides, at least 62 nucleotides, at least 63 nucleotides, at least 64 nucleotides, at least 65 nucleotides, at least 66 nucleotides, at least 67 nucleotides, at least 68 nucleotides, at least 69 nucleotides, at least 70 nucleotides, at least 71 nucleotides, at least 72 nucleotides, at least 73 nucleotides, at least 74 nucleotides, at least 75 nucleotides, at least 76 nucleotides, at least 77 nucleotides, at least 78 nucleotides, at least 79 nucleotides, at least 80 nucleotides, at least 81 nucleotides, at least 82 nucleotides, at least 83 nucleotides, at least 84 nucleotides, at least 85 nucleotides, at least 86 nucleotides, at least 87 nucleotides, at least 88 nucleotides, at least 89 nucleotides, at least 90 nucleotides, at least 91 nucleotides, at least 92 nucleotides, at least 93 nucleotides, at least 94 nucleotide at least 95 nucleotides, at least 96 nucleotides, at least 97 nucleotides, at least 98 nucleotides, at least 99 nucleotides, at least 100 nucleotides, at least 101 nucleotides, at least 102 nucleotides, at least 103 nucleotides, at least 104 nucleotides, at least 105 nucleotides, at least 106 nucleotides, at least 107 nucleotides, at least 108 nucleotides, at least 109 nucleotides, or at least 110 nucleotides in length.
[1097] 54. The system of embodiment 53, wherein the contiguous region becomes replaced by the duplex comprising the edited portion.
[1098] 55. The system of any one of embodiments 30-54, wherein the first and/or second DNA synthesis template is at least 1 nucleotide, at least 2 nucleotides, at least 3 nucleotides, at least 4 nucleotides, at least 5 nucleotides, at least 6 nucleotides, at least 7 nucleotides, at least 8 nucleotides, at least 9 nucleotides, at least 10 nucleotides, at least 11 nucleotides, at least 12 nucleotides, at least 13 nucleotides, at least 14 nucleotides, at least 15 nucleotides, at least 16 nucleotides, at least 17 nucleotides, at least 18 nucleotides, at least 19 nucleotides, at least 20 nucleotides, at least 21 nucleotides, at least 22 nucleotides, at least 23 nucleotides, at least 24 nucleotides, at least 25 nucleotides, at least 26 nucleotides, at least 27 nucleotides, at least 28 nucleotides, at least 29 nucleotides, at least 30 nucleotides, at least 31 nucleotides, at least 32 nucleotides, at least 33 nucleotides, at least 34 nucleotides, at least 35 nucleotides, at least 36 nucleotides, at least 37 nucleotides, at least 38 nucleotides, at least 39 nucleotides, at least 40 nucleotides, at least 41 nucleotides, at least 42 nucleotides, at least 43 nucleotides, at least 44 nucleotides, at least 45 nucleotides, at least 46 nucleotides, at least 47 nucleotides, at least 48 nucleotides, at least 49 nucleotides, at least 50 nucleotides, at least 51 nucleotides, at least 52 nucleotides, at least 53 nucleotides, at least 54 nucleotides, at least 55 nucleotides, at least 56 nucleotides, at least 57 nucleotides, at least 58 nucleotides, at least 59 nucleotides, at least 60 nucleotides, at least 61 nucleotides, at least 62 nucleotides, at least 63 nucleotides, at least 64 nucleotides, at least 65 nucleotides, at least 66 nucleotides, at least 67 nucleotides, at least 68 nucleotides, at least 69 nucleotides, at least 70 nucleotides, at least 71 nucleotides, at least 72 nucleotides, at least 73 nucleotides, at least 74 nucleotides, at least 75 nucleotides, at least 76 nucleotides, at least 77 nucleotides, at least 78 nucleotides, at least 79 nucleotides, at least 80 nucleotides, at least 81 nucleotides, at least 82 nucleotides, at least 83 nucleotides, at least 84 nucleotides, at least 85 nucleotides, at least 86 nucleotides, at least 87 nucleotides, at least 88 nucleotides, at least 89 nucleotides, at least 90 nucleotides, at least 91 nucleotides, at least 92 nucleotides, at least 93 nucleotides, at least 94 nucleotide at least 95 nucleotides, at least 96 nucleotides, at least 97 nucleotides, at least 98 nucleotides, at least 99 nucleotides, at least 100 nucleotides, at least 101 nucleotides, at least 102 nucleotides, at least 103 nucleotides, at least 104 nucleotides, at least 105 nucleotides, at least 106 nucleotides, at least 107 nucleotides, at least 108 nucleotides, at least 109 nucleotides, or at least 110 nucleotides in length.
[1099] 56. The system of any one of embodiments 30-55, wherein the first single-stranded DNA sequence and the second single-stranded DNA sequence have the same lengths.
[1100] 57. The system of any one of embodiments 30-55, wherein the first single-stranded DNA sequence and the second single-stranded DNA sequence have different lengths.
[1101] 58. The system of any one of embodiments 30-57, wherein the region of complementarity is at least 99%, at least 95%, at least 90%, at least 85%, at least 80%, at least 75%, at least 70%, at least 65%, at least 60%, at least 55%, at least 50%, at least 45%, at least 40%, at least 35%, at least 30%, at least 25%, at least 20%, at least 15%, or at least 10% of the total length of the first single-stranded DNA sequence or the second single-stranded DNA sequence.
[1102] 59. The system of any one of embodiments 30-58, wherein the region of complementarity is at least 5 nucleotides, at least 6 nucleotides, at least 7 nucleotides, at least 8 nucleotides, at least 9 nucleotides, at least 10 nucleotides, at least 11 nucleotides, at least 12 nucleotides, at least 13 nucleotides, at least 14 nucleotides, at least 15 nucleotides, at least 16 nucleotides, at least 17 nucleotides, at least 18 nucleotides, at least 19 nucleotides, at least 20 nucleotides, at least 21 nucleotides, at least 22 nucleotides, at least 23 nucleotides, at least 24 nucleotides, at least 25 nucleotides, at least 26 nucleotides, at least 27 nucleotides, at least 28 nucleotides, at least 29 nucleotides, at least 30 nucleotides, at least 31 nucleotides, at least 32 nucleotides, at least 33 nucleotides, at least 34 nucleotides, at least 35 nucleotides, at least 36 nucleotides, at least 37 nucleotides, at least 38 nucleotides, at least 39 nucleotides, at least 40 nucleotides, at least 41 nucleotides, at least 42 nucleotides, at least 43 nucleotides, at least 44 nucleotides, at least 45 nucleotides, at least 46 nucleotides, at least 47 nucleotides, at least 48 nucleotides, at least 49 nucleotides, at least 50 nucleotides, at least 51 nucleotides, at least 52 nucleotides, at least 53 nucleotides, at least 54 nucleotides, at least 55 nucleotides, at least 56 nucleotides, at least 57 nucleotides, at least 58 nucleotides, at least 59 nucleotides, at least 60 nucleotides, at least 61 nucleotides, at least 62 nucleotides, at least 63 nucleotides, at least 64 nucleotides, at least 65 nucleotides, at least 66 nucleotides, at least 67 nucleotides, at least 68 nucleotides, at least 69 nucleotides, at least 70 nucleotides, at least 71 nucleotides, at least 72 nucleotides, at least 73 nucleotides, at least 74 nucleotides, at least 75 nucleotides, at least 76 nucleotides, at least 77 nucleotides, at least 78 nucleotides, at least 79 nucleotides, at least 80 nucleotides, at least 81 nucleotides, at least 82 nucleotides, at least 83 nucleotides, at least 84 nucleotides, at least 85 nucleotides, at least 86 nucleotides, at least 87 nucleotides, at least 88 nucleotides, at least 89 nucleotides, at least 90 nucleotides, at least 91 nucleotides, at least 92 nucleotides, at least 93 nucleotides, at least 94 nucleotide at least 95 nucleotides, at least 96 nucleotides, at least 97 nucleotides, at least 98 nucleotides, at least 99 nucleotides, at least 100 nucleotides, at least 101 nucleotides, at least 102 nucleotides, at least 103 nucleotides, at least 104 nucleotides, at least 105 nucleotides, at least 106 nucleotides, at least 107 nucleotides, at least 108 nucleotides, at least 109 nucleotides, or at least 110 nucleotides in length.
[1103] 60. The system of any one of embodiments 30-59, wherein the region of complementarity of the first single-stranded DNA sequence and the second single-stranded DNA sequence form a duplex.
[1104] 61. The system of any one of embodiments 30-60, wherein the first single-stranded DNA sequence and the second single-stranded DNA sequence are each single-stranded DNA strands having 3′ ends.
[1105] 62. The system of embodiment 54, wherein the replacement of the contiguous region by the duplex comprising the edited portion results in an insertion, deletion, or replacement of DNA at the target site.
[1106] 63. A polynucleotide encoding the system of any of embodiments 1-62.
[1107] 64. A polynucleotide encoding the first and second prime editors of any one of embodiments 1-62.
[1108] 65. A polynucleotide encoding the first and/or second pegRNA of any one of embodiments 1-29.
[1109] 66. A polynucleotide encoding the first and/or second pegRNA of any one of embodiments 30-62.
[1110] 67. A polynucleotide encoding the first and second pegRNA of any one of embodiments 1-29.
[1111] 68. A polynucleotide encoding the first and second pegRNA of any one of embodiments 30-62.
[1112] 69. A vector comprising a polynucleotide of any one of embodiments 63-68.
[1113] 70. A cell comprising a polynucleotide of any one of embodiments 63-69 or a vector of embodiment 64.
[1114] 71. A pharmaceutical composition comprising a polynucleotide of any one of embodiments 63-68, a vector of embodiment 69, or a cell of embodiment 70, and a pharmaceutical excipient.
[1115] 72. A kit comprising a polynucleotide of any of embodiments 63-69 or a vector of embodiment 70 and instructions for simultaneously editing both strands of a double-stranded DNA sequence at a target site to be edited.
[1116] 73. A method for simultaneously editing a first and a second complementary strands of a double-stranded DNA sequence at a target site, said method comprising contacting the double-stranded DNA sequence with a pair of prime editor complexes, said pair comprising:
   [1117] a. a first prime editor complex, comprising:
      [1118] i. a first prime editor comprising a first nucleic acid programmable DNA binding protein (napDNAbp) and a first polypeptide comprising an RNA-dependent DNA polymerase activity; and
      [1119] ii. a first prime editing guide RNA (first PEgRNA) that binds to a first binding site on the first strand of the genomic DNA sequence upstream of the target site;
   [1120] b. a second prime editor complex, comprising:
      [1121] i. a second prime editor comprising a second nucleic acid programmable DNA binding protein (second napDNAbp) and a second polypeptide comprising an RNA-dependent DNA polymerase activity; and
      [1122] ii. a second prime editing guide RNA (second PEgRNA) that binds to a second binding site on the second strand of the genomic DNA sequence downstream of the target site;

[1123] wherein the first prime editor complex causes a first nick at a sequence complementary to the first binding site and the subsequent polymerization of a first single-stranded DNA sequence having a 3′-end from the available 5′-end formed by the first nick;
[1124] wherein the second prime editor complex causes a second nick at a sequence complementary to the second binding site and the subsequent polymerization of a second single-stranded DNA sequence having a 3′-end from the available 5′-end formed by the second nick;

[1125] wherein the first single-stranded DNA sequence and the second single-stranded DNA sequence are reverse complements over at least a region of complementarity and form a duplex comprising an edit; and
[1126] wherein the the duplex replaces the nicked first and second complementary strands of the double-stranded DNA sequence.
[1127] 74. The method of embodiment 73, wherein the prime editor of the first prime editor complex, the second prime editor complex, or both the first prime editor complex and the second prime editor complex is a fusion protein comprising the napDNAbp and the polypeptide having an RNA-dependent DNA polymerase activity
[1128] 75. The method of embodiment 73, wherein the first prime editor complex and the second prime editor complex comprise the same prime editor.
[1129] 76. The method of embodiment 73, wherein the first prime editor complex and the second prime editor complex comprise a different prime editor.
[1130] 77. The method of any one of embodiments 73-76, wherein the first and/or second napDNAbp is a Cas9 domain or variant thereof.
[1131] 78. The method of any one of embodiments 73-77, wherein the first and/or second napDNAbp is a nuclease active Cas9 domain, a nuclease inactive Cas9 domain, a Cas9 nickase domain, or variant thereof.
[1132] 79. The method of any one of embodiments 73-76, wherein the first and/or second napDNAbp is selected from the group consisting of: Cas9, Cas12e, Cas12d, Cas12a, Cas12b1, Cas13a, Cas12c, CasX, CasY, and Argonaute.
[1133] 80. The method of any one of embodiments 73-79, wherein the first and/or second napDNAbp has a nickase activity.
[1134] 81. The method of any one of embodiments 73-80, wherein the first and/or second napDNAbp comprises an amino acid sequence of any one of SEQ ID NOs: 18-88, or an amino acid sequence having at least an 80%, 85%, 90%, 95%, or 99% sequence identity with any one of SEQ ID NOs: 18-88.
[1135] 82. The method of any one of embodiments 73-81, wherein the first and/or second polypeptide having an RNA-dependent DNA polymerase activity is a reverse transcriptase.
[1136] 83. The method of any one of embodiments 73-82, wherein the first and/or second polypeptide having an RNA-dependent DNA polymerase activity comprises an amino acid sequence of any one of SEQ ID NOs: 89-100, 105-122, 128-129, 132, 139, 143, 149, 154, 159, and 700-766 or an amino acid sequence having at least an 80%, 85%, 90%, 95%, or 99% sequence identity with any one of SEQ ID NOs: 89-100, 105-122, 128-129, and 132.
[1137] 84. The method of any one of embodiments 73-83, wherein the first prime editor further comprises a linker that joins the first napDNAbp and the first polypeptide having the RNA-dependent DNA polymerase activity, and/or the second prime editor further comprises a linker that joins the second napDNAbp and the second polypeptide having the RNA-dependent DNA polymerase activity.
[1138] 85. The method of embodiment 84, wherein the linker comprises an amino acid sequence of any one of SEQ ID NOs: 166-177, or an amino acid sequence having at least an 80%, 85%, 90%, 95%, or 99% sequence identity with any one of SEQ ID NOs: 166-177.
[1139] 86. The method of embodiment 84 or 85, wherein the linker is 1, 2, 3, 4, 5, 6, 7, 8, 9, 10, 11, 12, 13, 14, 15, 16, 17, 18, 19, 20, 21, 22, 23, 24, 25, 26, 27, 28, 29, 30, 31, 32, 33, 34, 35, 36, 38, 38, 39, 40, 41, 42, 43, 44, 45, 46, 47, 48, 49, or 50 amino acids in length.
[1140] 87. The method of any one of embodiments 73-86, wherein the first and/or second pegRNA comprises a nucleotide sequence of any one of SEQ ID NOs: 325-330, 499-505, 101-104, 181-183, and 223-244, or a nucleotide sequence having at least an 80%, 85%, 90%, 95%, or 99% sequence identity with any one of SEQ ID NOs: 325-330, 499-505, 101-104, 181-183, and 223-244.
[1141] 88. The method of any one of embodiments 73-87, wherein the first and/or second PEgRNA comprises a nucleotide sequence of any one of SEQ ID NOs: 325-330, 499-505, 101-104, 181-183, and 223-244, or a nucleotide sequence having at least an 80%, 85%, 90%, 95%, or 99% sequence identity with any one of SEQ ID NOs: 325-330, 499-505, 101-104, 181-183, and 223-244.
[1142] 89. The method of any one of embodiments 73-88, wherein the first spacer sequence of the first prime editor complex binds to a first binding site on a first strand of the double-stranded DNA sequence upstream from the target site to be edited.
[1143] 90. The method of any one of embodiments 73-89, wherein the second spacer sequence of the second prime editor complex binds to a second binding site on a second strand of the double-stranded DNA sequence downstream from the target site to be edited.
[1144] 91. The method of embodiment 90, wherein the binding of the first and second spacer sequences of the first and second prime editor complexes in the presence of a PAM sequence results in the nicking of the first and second strands, respectively, at a nick site proximal to the PAM sequence on each strand by the napDNAbps of each first and second prime editor complex.
[1145] 92. The method of embodiment 91, wherein the first and second binding sites define two ends of a contiguous region of double-stranded DNA comprising the target site to be edited.
[1146] 93. The method of embodiment 92, wherein the contiguous region between the first and second binding sites is least 10 nucleobase pairs, at least 11 nucleobase pairs, at least 12 nucleobase pairs, at least 13 nucleobase pairs, at least 14 nucleobase pairs, at least 15 nucleobase pairs, at least 16 nucleobase pairs, at least 17 nucleobase pairs, at least 18 nucleobase pairs, at least 19 nucleobase pairs, at least 20 nucleobase pairs, at least 21 nucleobase pairs, at least 22 nucleobase pairs, at least 23 nucleobase pairs, at least 24 nucleobase pairs, at least 25 nucleobase pairs, at least 26 nucleobase pairs, at least 27 nucleobase pairs, at least 28 nucleobase pairs, at least 29 nucleobase pairs, at least 30 nucleobase pairs, at least 31 nucleobase pairs, at least 32 nucleobase pairs, at least 33 nucleobase pairs, at least 34 nucleobase pairs, at least 35 nucleobase pairs, at least 36 nucleobase pairs, at least 37 nucleobase pairs, at least 37 nucleobase pairs, at least 38 nucleobase pairs, at least 39 nucleobase pairs, or at least 40 nucleobase pairs, at least 41 nucleotides, at least 42 nucleotides, at least 43 nucleotides, at least 44 nucleotides, at least 45 nucleotides, at least 46 nucleotides, at least 47 nucleotides, at least 48 nucleotides, at least 49 nucleotides, at least 50 nucleotides, at least 51 nucleotides, at least 52 nucleotides, at least 53 nucleotides, at least 54 nucleotides, at least 55 nucleotides, at least 56 nucleotides, at least 57 nucleotides, at least 58 nucleotides, at least 59 nucleotides, at least 60 nucleotides, at least 61 nucleotides, at least 62 nucleotides, at least 63 nucleotides, at least 64 nucleotides, at least 65 nucleotides, at least 66 nucleotides, at least 67 nucleotides, at least 68 nucleotides, at least 69 nucleotides, at least 70 nucleotides, at least 71 nucleotides, at least 72 nucleotides, at least 73 nucleotides, at least 74 nucleotides, at least 75 nucleotides, at least 76 nucleotides, at least 77 nucleotides, at least 78 nucleotides, at least 79 nucleotides, at least 80 nucleotides, at least 81 nucleotides, at least 82 nucleotides, at least 83 nucleotides, at least 84 nucleotides, at least 85 nucleotides, at least 86 nucleotides, at least 87 nucleotides, at least 88 nucleotides, at least 89 nucleotides, at least 90 nucleotides, at least 91 nucleotides, at least 92 nucleotides, at least 93 nucleotides, at least 94 nucleotide at least 95 nucleotides, at least 96 nucleotides, at least 97 nucleotides, at least 98 nucleotides, at least 99 nucleotides, at least 100 nucleotides, at least 101 nucleotides, at least 102 nucleotides, at least 103 nucleotides, at least 104 nucleotides, at least 105 nucleotides, at least 106 nucleotides, at least 107 nucleotides, at least 108 nucleotides, at least 109 nucleotides, or at least 110 nucleotides in length.
[1147] 94. The method of embodiment 92 or 93, wherein the contiguous region becomes replaced by the duplex comprising the edited portion.
[1148] 95. The method of any one of embodiments 73-94, wherein the first and/or second DNA synthesis template is at least 1 nucleotide, at least 2 nucleotides, at least 3 nucleotides, at least 4 nucleotides, at least 5 nucleotides, at least 6 nucleotides, at least 7 nucleotides, at least 8 nucleotides, at least 9 nucleotides, at least 10 nucleotides, at least 11 nucleotides, at least 12 nucleotides, at least 13 nucleotides, at least 14 nucleotides, at least 15 nucleotides, at least 16 nucleotides, at least 17 nucleotides, at least 18 nucleotides, at least 19 nucleotides, at least 20 nucleotides, at least 21 nucleotides, at least 22 nucleotides, at least 23 nucleotides, at least 24 nucleotides, at least 25 nucleotides, at least 26 nucleotides, at least 27 nucleotides, at least 28 nucleotides, at least 29 nucleotides, at least 30 nucleotides, at least 31 nucleotides, at least 32 nucleotides, at least 33 nucleotides, at least 34 nucleotides, at least 35 nucleotides, at least 36 nucleotides, at least 37 nucleotides, at least 38 nucleotides, at least 39 nucleotides, at least 40 nucleotides, at least 41 nucleotides, at least 42 nucleotides, at least 43 nucleotides, at least 44 nucleotides, at least 45 nucleotides, at least 46 nucleotides, at least 47 nucleotides, at least 48 nucleotides, at least 49 nucleotides, at least 50 nucleotides, at least 51 nucleotides, at least 52 nucleotides, at least 53 nucleotides, at least 54 nucleotides, at least 55 nucleotides, at least 56 nucleotides, at least 57 nucleotides, at least 58 nucleotides, at least 59 nucleotides, at least 60 nucleotides, at least 61 nucleotides, at least 62 nucleotides, at least 63 nucleotides, at least 64 nucleotides, at least 65 nucleotides, at least 66 nucleotides, at least 67 nucleotides, at least 68 nucleotides, at least 69 nucleotides, at least 70 nucleotides, at least 71 nucleotides, at least 72 nucleotides, at least 73 nucleotides, at least 74 nucleotides, at least 75 nucleotides, at least 76 nucleotides, at least 77 nucleotides, at least 78 nucleotides, at least 79 nucleotides, at least 80 nucleotides, at least 81 nucleotides, at least 82 nucleotides, at least 83 nucleotides, at least 84 nucleotides, at least 85 nucleotides, at least 86 nucleotides, at least 87 nucleotides, at least 88 nucleotides, at least 89 nucleotides, at least 90 nucleotides, at least 91 nucleotides, at least 92 nucleotides, at least 93 nucleotides, at least 94 nucleotide at least 95 nucleotides, at least 96 nucleotides, at least 97 nucleotides, at least 98 nucleotides, at least 99 nucleotides, at least 100 nucleotides, at least 101 nucleotides, at least 102 nucleotides, at least 103 nucleotides, at least 104 nucleotides, at least 105 nucleotides, at least 106 nucleotides, at least 107 nucleotides, at least 108 nucleotides, at least 109 nucleotides, or at least 110 nucleotides in length.
[1149] 96. The method of any one of embodiments 73-95, wherein the first single-stranded DNA sequence and the second single-stranded DNA sequence have the same lengths.
[1150] 97. The method of any one of embodiments 73-95, wherein the first single-stranded DNA sequence and the second single-stranded DNA sequence have different lengths.
[1151] 98. The method of any one of embodiments 73-97, wherein the region of complementarity is at least 99%, at least 95%, at least 90%, at least 85%, at least 80%, at least 75%, at least 70%, at least 65%, at least 60%, at least 55%, at least 50%, at least 45%, at least 40%, at least 35%, at least 30%, at least 25%, at least 20%, at least 15%, or at least 10% of the total length of the first single-stranded DNA sequence or the second single-stranded DNA sequence.
[1152] 99. The method of any one of embodiments 73-98, wherein the region of complementarity is at least 5 nucleotides, at least 6 nucleotides, at least 7 nucleotides, at least 8 nucleotides, at least 9 nucleotides, at least 10 nucleotides, at least 11 nucleotides, at least 12 nucleotides, at least 13 nucleotides, at least 14 nucleotides, at least 15 nucleotides, at least 16 nucleotides, at least 17 nucleotides, at least 18 nucleotides, at least 19 nucleotides, at least 20 nucleotides, at least 21 nucleotides, at least 22 nucleotides, at least 23 nucleotides, at least 24 nucleotides, at least 25 nucleotides, at least 26 nucleotides, at least 27 nucleotides, at least 28 nucleotides, at least 29 nucleotides, at least 30 nucleotides, at least 31 nucleotides, at least 32 nucleotides, at least 33 nucleotides, at least 34 nucleotides, at least 35 nucleotides, at least 36 nucleotides, at least 37 nucleotides, at least 38 nucleotides, at least 39 nucleotides, at least 40 nucleotides, at least 41 nucleotides, at least 42 nucleotides, at least 43 nucleotides, at least 44 nucleotides, at least 45 nucleotides, at least 46 nucleotides, at least 47 nucleotides, at least 48 nucleotides, at least 49 nucleotides, at least 50 nucleotides, at least 51 nucleotides, at least 52 nucleotides, at least 53 nucleotides, at least 54 nucleotides, at least 55 nucleotides, at least 56 nucleotides, at least 57 nucleotides, at least 58 nucleotides, at least 59 nucleotides, at least 60 nucleotides, at least 61 nucleotides, at least 62 nucleotides, at least 63 nucleotides, at least 64 nucleotides, at least 65 nucleotides, at least 66 nucleotides, at least 67 nucleotides, at least 68 nucleotides, at least 69 nucleotides, at least 70 nucleotides, at least 71 nucleotides, at least 72 nucleotides, at least 73 nucleotides, at least 74 nucleotides, at least 75 nucleotides, at least 76 nucleotides, at least 77 nucleotides, at least 78 nucleotides, at least 79 nucleotides, at least 80 nucleotides, at least 81 nucleotides, at least 82 nucleotides, at least 83 nucleotides, at least 84 nucleotides, at least 85 nucleotides, at least 86 nucleotides, at least 87 nucleotides, at least 88 nucleotides, at least 89 nucleotides, at least 90 nucleotides, at least 91 nucleotides, at least 92 nucleotides, at least 93 nucleotides, at least 94 nucleotide at least 95 nucleotides, at least 96 nucleotides, at least 97 nucleotides, at least 98 nucleotides, at least 99 nucleotides, at least 100 nucleotides, at least 101 nucleotides, at least 102 nucleotides, at least 103 nucleotides, at least 104 nucleotides, at least 105 nucleotides, at least 106 nucleotides, at least 107 nucleotides, at least 108 nucleotides, at least 109 nucleotides, or at least 110 nucleotides in length, and is either less than or equal to the length of the desired DNA sequence and complement thereof.
[1153] 100. The method of any one of embodiments 73-99, wherein the region of complementarity of the first single-stranded DNA sequence and the second single-stranded DNA sequence form the duplex.
[1154] 101. The method of any one of embodiments 73-100, wherein the first single-stranded DNA sequence and the second single-stranded DNA sequence are each single-stranded DNA strands having 3′ ends.
[1155] 102. The method of embodiment 94, wherein the replacement of the contiguous region by the duplex comprising the edited portion results in an insertion, deletion, or replacement of DNA at the target site.
[1156] 103. The method of any one of embodiments 73-102, wherein the duplex comprising an edit comprising one or more recombinase sites.
[1157] 104. The method of embodiment 103 further comprising providing a recombinase to promote recombinase-mediated editing of the DNA sequence at the target site to be edited.
[1158] 105. A pair of pegRNAs for use in dual prime editing, wherein the pair comprises:
   [1159] a. a first prime editing guide RNA (first PEgRNA) that binds to a first binding site on a first strand of a double-stranded DNA sequence upstream of a target site to be edited, wherein the first PEgRNA comprises a first spacer sequence, a first gRNA core, a first DNA synthesis template, and a first primer binding site, wherein the first DNA synthesis template encodes a first single-stranded DNA sequence comprising an edited portion;
   [1160] b. a second prime editing guide RNA (second PEgRNA) that binds to a second binding site on a second strand of the double-stranded DNA sequence downstream of the target site to be edited, wherein the second PEgRNA comprises a second spacer sequence, a second gRNA core, a second DNA synthesis template, and a second primer binding site, wherein the second DNA synthesis template encodes a second single-stranded DNA sequence comprising the edited portion, wherein the second single-stranded DNA sequence comprises a region of complementarity to the first single-stranded DNA sequence.
[1161] 106. The pair of pegRNAs of embodiment 105, wherein the first PEgRNA comprises the structure:
   [1162] 5′-[first gRNA spacer sequence]-[first gRNA core]-[first DNA synthesis template]-[first primer binding site]-3′; and
   [1163] wherein the second PEgRNA comprises the structure:
   [1164] 5′-[second gRNA spacer sequence]-[second gRNA core]-[second DNA synthesis template]-[second primer binding site]-3′.
[1165] 107. The pair of pegRNAs of embodiment 105 or 106, wherein the first single-stranded DNA sequence and the second single-stranded DNA sequence form a duplex that integrates into the double-stranded DNA sequence at the target site to be edited.
[1166] 108. The pair of pegRNAs of embodiment 107, wherein the integration of the duplex results in an insertion, deletion, or replacement of DNA at the target site.
[1167] 109. The pair of pegRNAs of embodiment 108, wherein the insertion is at least 1 nucleotide, at least 2 nucleotides, at least 3 nucleotides, at least 4 nucleotides, at least 5 nucleotides, at least 6 nucleotides, at least 7 nucleotides, at least 8 nucleotides, at least 9 nucleotides, at least 10 nucleotides, at least 11 nucleotides, at least 12 nucleotides, at least 13 nucleotides, at least 14 nucleotides, at least 15 nucleotides, at least 16 nucleotides, at least 17 nucleotides, at least 18 nucleotides, at least 19 nucleotidesis, at least 20 nucleotides, at least 21 nucleotides, at least 22 nucleotides, at least 23 nucleotides, at least 24 nucleotides, at least 25 nucleotides, at least 26 nucleotides, at least 27 nucleotides, at least 28 nucleotides, at least 29 nucleotides, at least 30 nucleotides, at least 31 nucleotides, at least 32 nucleotides, at least 33 nucleotides, at least 34 nucleotides, at least 35 nucleotides, at least 36 nucleotides, at least 37 nucleotides, at least 38 nucleotides, at least 39 nucleotides, at least 40 nucleotides, at least 41 nucleotides, at least 42 nucleotides, at least 43 nucleotides, at least 44 nucleotides, at least 45 nucleotides, at least 46 nucleotides, at least 47 nucleotides, at least 48 nucleotides, at least 49 nucleotides, at least 50 nucleotides, at least 51 nucleotides, at least 52 nucleotides, at least 53 nucleotides, at least 54 nucleotides, at least 55 nucleotides, at least 56 nucleotides, at least 57 nucleotides, at least 58 nucleotides, at least 59 nucleotides, at least 60 nucleotides, at least 61 nucleotides, at least 62 nucleotides, at least 63 nucleotides, at least 64 nucleotides, at least 65 nucleotides, at least 66 nucleotides, at least 67 nucleotides, at least 68 nucleotides, at least 69 nucleotides, at least 70 nucleotides, at least 71 nucleotides, at least 72 nucleotides, at least 73 nucleotides, at least 74 nucleotides, at least 75 nucleotides, at least 76 nucleotides, at least 77 nucleotides, at least 78 nucleotides, at least 79 nucleotides, at least 80 nucleotides, at least 81 nucleotides, at least 82 nucleotides, at least 83 nucleotides, at least 84 nucleotides, at least 85 nucleotides, at least 86 nucleotides, at least 87 nucleotides, at least 88 nucleotides, at least 89 nucleotides, at least 90 nucleotides, at least 91 nucleotides, at least 92 nucleotides, at least 93 nucleotides, at least 94 nucleotide at least 95 nucleotides, at least 96 nucleotides, at least 97 nucleotides, at least 98 nucleotides, at least 99 nucleotides, at least 100 nucleotides, at least 101 nucleotides, at least 102 nucleotides, at least 103 nucleotides, at least 104 nucleotides, at least 105 nucleotides, at least 106 nucleotides, at least 107 nucleotides, at least 108 nucleotides, at least 109 nucleotides, or at least 110 nucleotides in length.
[1168] 110. The pair of pegRNAs of embodiment 109, wherein the deletion is at least 1 nucleotide, at least 2 nucleotides, at least 3 nucleotides, at least 4 nucleotides, at least 5 nucleotides, at least 6 nucleotides, at least 7 nucleotides, at least 8 nucleotides, at least 9 nucleotides, at least 10 nucleotides, at least 11 nucleotides, at least 12 nucleotides, at least 13 nucleotides, at least 14 nucleotides, at least 15 nucleotides, at least 16 nucleotides, at least 17 nucleotides, at least 18 nucleotides, at least 19 nucleotidesis at least 20 nucleotides, at least 21 nucleotides, at least 22 nucleotides, at least 23 nucleotides, at least 24 nucleotides, at least 25 nucleotides, at least 26 nucleotides, at least 27 nucleotides, at least 28 nucleotides, at least 29 nucleotides, at least 30 nucleotides, at least 31 nucleotides, at least 32 nucleotides, at least 33 nucleotides, at least 34 nucleotides, at least 35 nucleotides, at least 36 nucleotides, at least 37 nucleotides, at least 38 nucleotides, at least 39 nucleotides, at least 40 nucleotides, at least 41 nucleotides, at least 42 nucleotides, at least 43 nucleotides, at least 44 nucleotides, at least 45 nucleotides, at least 46 nucleotides, at least 47 nucleotides, at least 48 nucleotides, at least 49 nucleotides, at least 50 nucleotides, at least 51 nucleotides, at least 52 nucleotides, at least 53 nucleotides, at least 54 nucleotides, at least 55 nucleotides, at least 56 nucleotides, at least 57 nucleotides, at least 58 nucleotides, at least 59 nucleotides, at least 60 nucleotides, at least 61 nucleotides, at least 62 nucleotides, at least 63 nucleotides, at least 64 nucleotides, at least 65 nucleotides, at least 66 nucleotides, at least 67 nucleotides, at least 68 nucleotides, at least 69 nucleotides, at least 70 nucleotides, at least 71 nucleotides, at least 72 nucleotides, at least 73 nucleotides, at least 74 nucleotides, at least 75 nucleotides, at least 76 nucleotides, at least 77 nucleotides, at least 78 nucleotides, at least 79 nucleotides, at least 80 nucleotides, at least 81 nucleotides, at least 82 nucleotides, at least 83 nucleotides, at least 84 nucleotides, at least 85 nucleotides, at least 86 nucleotides, at least 87 nucleotides, at least 88 nucleotides, at least 89 nucleotides, at least 90 nucleotides, at least 91 nucleotides, at least 92 nucleotides, at least 93 nucleotides, at least 94 nucleotide at least 95 nucleotides, at least 96 nucleotides, at least 97 nucleotides, at least 98 nucleotides, at least 99 nucleotides, at least 100 nucleotides, at least 101 nucleotides, at least 102 nucleotides, at least 103 nucleotides, at least 104 nucleotides, at least 105 nucleotides, at least 106 nucleotides, at least 107 nucleotides, at least 108 nucleotides, at least 109 nucleotides, or at least 110 nucleotides, or more in length.
[1169] 111. The pair of pegRNAs of embodiment 110, wherein the replacement is at least 1 nucleotide, at least 2 nucleotides, at least 3 nucleotides, at least 4 nucleotides, at least 5 nucleotides, at least 6 nucleotides, at least 7 nucleotides, at least 8 nucleotides, at least 9 nucleotides, at least 10 nucleotides, at least 11 nucleotides, at least 12 nucleotides, at least 13 nucleotides, at least 14 nucleotides, at least 15 nucleotides, at least 16 nucleotides, at least 17 nucleotides, at least 18 nucleotides, at least 19 nucleotidesis at least 20 nucleotides, at least 21 nucleotides, at least 22 nucleotides, at least 23 nucleotides, at least 24 nucleotides, at least 25 nucleotides, at least 26 nucleotides, at least 27 nucleotides, at least 28 nucleotides, at least 29 nucleotides, at least 30 nucleotides, at least 31 nucleotides, at least 32 nucleotides, at least 33 nucleotides, at least 34 nucleotides, at least 35 nucleotides, at least 36 nucleotides, at least 37 nucleotides, at least 38 nucleotides, at least 39 nucleotides, at least 40 nucleotides, at least 41 nucleotides, at least 42 nucleotides, at least 43 nucleotides, at least 44 nucleotides, at least 45 nucleotides, at least 46 nucleotides, at least 47 nucleotides, at least 48 nucleotides, at least 49 nucleotides, at least 50 nucleotides, at least 51 nucleotides, at least 52 nucleotides, at least 53 nucleotides, at least 54 nucleotides, at least 55 nucleotides, at least 56 nucleotides, at least 57 nucleotides, at least 58 nucleotides, at least 59 nucleotides, at least 60 nucleotides, at least 61 nucleotides, at least 62 nucleotides, at least 63 nucleotides, at least 64 nucleotides, at least 65 nucleotides, at least 66 nucleotides, at least 67 nucleotides, at least 68 nucleotides, at least 69 nucleotides, at least 70 nucleotides, at least 71 nucleotides, at least 72 nucleotides, at least 73 nucleotides, at least 74 nucleotides, at least 75 nucleotides, at least 76 nucleotides, at least 77 nucleotides, at least 78 nucleotides, at least 79 nucleotides, at least 80 nucleotides, at least 81 nucleotides, at least 82 nucleotides, at least 83 nucleotides, at least 84 nucleotides, at least 85 nucleotides, at least 86 nucleotides, at least 87 nucleotides, at least 88 nucleotides, at least 89 nucleotides, at least 90 nucleotides, at least 91 nucleotides, at least 92 nucleotides, at least 93 nucleotides, at least 94 nucleotide at least 95 nucleotides, at least 96 nucleotides, at least 97 nucleotides, at least 98 nucleotides, at least 99 nucleotides, at least 100 nucleotides, at least 101 nucleotides, at least 102 nucleotides, at least 103 nucleotides, at least 104 nucleotides, at least 105 nucleotides, at least 106 nucleotides, at least 107 nucleotides, at least 108 nucleotides, at least 109 nucleotides, or at least 110 nucleotides, or more in length.
[1170] 112. A polynucleotide encoding a pair of pegRNAs of any one of embodiments 105-111.
[1171] 113. A vector comprising the polynucleotide of embodiment 112 for expressing the pair of pegRNAs in a cell.
[1172] 114. A cell comprising the vector of embodiment 113.
[1173] 115. A pharmaceutical composition comprising a pair of pegRNAs of any one of embodiments 105-111, a vector of embodiment 113, or a cell of embodiment 114, and a pharmaceutical excipient.
[1174] 116. A pair of prime editor complexes, said pair comprises:
   [1175] a. a first prime editor complex, comprising:
      [1176] i. a first prime editor comprising a first nucleic acid programmable DNA binding protein (napDNAbp) and a first polypeptide comprising an RNA-dependent DNA polymerase activity; and
      [1177] ii. a first prime editing guide RNA (first PEgRNA) that binds to a first target sequence on the strand of the genomic DNA sequence upstream of the target site;
   [1178] b. a second prime editor complex, comprising:
      [1179] i. a second prime editor comprising a second nucleic acid programmable DNA binding protein (second napDNAbp) and a second polypeptide comprising an RNA-dependent DNA polymerase activity; and
      [1180] ii. a second prime editing guide RNA (second PEgRNA) that binds to a second target sequence on the second strand of the genomic DNA sequence downstream of the target site.
[1181] 117. The pair of prime editor complexes of embodiment 116, wherein the prime editor of the first prime editor complex, the second prime editor complex, or both the first prime editor complex and the second prime editor complex is a fusion protein comprising the napDNAbp and the polypeptide having an RNA-dependent DNA polymerase activity.
[1182] 118. A polynucleotide encoding a pair of prime editor complexes of embodiment 116 or 117.
[1183] 119. A vector comprising the polynucleotide of embodiment 118 for expressing the pair of prime editor complexes in a cell.
[1184] 120. A cell comprising the vector of embodiment 119.
[1185] 121. A pharmaceutical composition comprising a pair of prime editor complexes of embodiment 116 or 117, a vector of embodiment 119, or a cell of embodiment 120, and a pharmaceutical excipient.
[1186] 122. The system of any one of embodiments 1-62, or the method of any one of embodiments 68-98, wherein integration of the duplex comprising the edited portion results in an insertion, deletion, or replacement of DNA at the target site.
[1187] 123. The system or method of embodiment 122, wherein the insertion is a peptide tag.
[1188] 124. The system or method of embodiment 123, wherein the peptide tag is a poly-histidine (e.g., HHHHHH) (SEQ ID NO: 252-262), FLAG (e.g., DYKDDDDK) (SEQ ID NO: 2), V5 (e.g., GKPIPNPLLGLDST) (SEQ ID NO: 3), GCN4, HA (e.g., YPYDVPDYA) (SEQ ID NO: 5), Myc (e.g. EQKLISEED) (SEQ ID NO: 6), or GST.
[1189] 125. The system or method of embodiment 123, wherein the peptide tag has an amino acid sequence selected from the group consisting of SEQ ID NO: 1-6, 245-249, 252-262, 264-273, 275-276, 281, 278-288, and 622.
[1190] 126. The system or method of embodiment 122, wherein the insertion is an immunoepitope tag.
[1191] 127. The system or method of embodiment 126, wherien the immunoepitope tag is selected from the group consisting of: tetanus toxoid (SEQ ID NO: 396); diphtheria toxin mutant CRM197 (SEQ ID NO: 630); mumps immunoepitope 1 (SEQ ID NO: 400); mumps immunoepitope 2 (SEQ ID NO: 402); mumps immunoeptitope 3 (SEQ ID NO: 404); rubella virus (SEQ ID NO: 406); hemagglutinin (SEQ ID NO: 408); neuraminidase (SEQ ID NO: 410); TAP1 (SEQ ID NO: 412); TAP2 (SEQ ID NO: 414); hemagglutinin epitopes toward class I HLA (SEQ ID NO: 416); neuraminidase epitopes toward class I HLA (SEQ ID NO: 418); hemagglutinin epitopes toward class II HLA (SEQ ID NO: 420); neuraminidase epitopes toward class II HLA (SEQ ID NO: 422); hemagglutinin epitope H5N1-bound class I and class II HLA (SEQ ID NO: 424); and neuraminidase epitope H5N1-bound class I and class II HLA (SEQ ID NO: 426).
[1192] 128. The system or method of embodiment 122, wherein the insertion is a dimerization domain
[1193] 129. The system or method of embodiment 128, wherein the dimerization domain is small molecule binding domain of FKBP12 of SEQ ID NO: 488, FKBP12-F36V of SEQ ID NO: 489, or cyclophilin of SEQ ID NOs: 490 or 493-494.
[1194] 130. A system for simultaneously editing both strands of a double-stranded DNA sequence at a target site to be edited, the system comprising:
   [1195] a) a first prime editor complex comprising:
      [1196] i. a first prime editor comprising a first nucleic acid programmable DNA binding protein (first napDNAbp) and a first polypeptide comprising an RNA-dependent DNA polymerase activity; and
      [1197] ii. a first prime editing guide RNA (first PEgRNA) that binds to a first binding site on a first strand of the double-stranded DNA sequence upstream of the target site to be edited;
   [1198] b) a second prime editor complex comprising:
      [1199] iii. a second prime editor comprising a second nucleic acid programmable DNA binding protein (second napDNAbp) and a second polypeptide comprising an RNA-dependent DNA polymerase activity; and
      [1200] iv. a second prime editing guide RNA (second PEgRNA) that binds to a second binding site on a second strand of the double-stranded DNA sequence upstream of the target site to be edited;
   [1201] c) a third prime editor complex comprising:
      [1202] iii. a third prime editor comprising a third nucleic acid programmable DNA binding protein (third napDNAbp) and a third polypeptide comprising an RNA-dependent DNA polymerase activity; and
      [1203] iv. a third prime editing guide RNA (third PEgRNA) that binds to a third binding site on the first strand of the double-stranded DNA sequence downstream of the target site to be edited;
   [1204] d) a fourth prime editor complex comprising:
      [1205] iii. a fourth prime editor comprising a fourth nucleic acid programmable DNA binding protein (fourth napDNAbp) and a fourth polypeptide comprising an RNA-dependent DNA polymerase activity; and
      [1206] iv. a fourth prime editing guide RNA (fourth PEgRNA) that binds to a fourth binding site on the second strand of the double-stranded DNA sequence downstream of the target site to be edited;
         [1207] wherein the first PEgRNA comprises a first DNA synthesis template encoding a first single-stranded DNA sequence, the second PEgRNA comprises a second DNA synthesis template encoding a second single-stranded DNA sequence, the third PEgRNA comprises a third DNA synthesis template encoding a third single-stranded DNA sequence, and the fourth PEgRNA comprises a fourth DNA synthesis template encoding a fourth single-stranded DNA sequence;
         [1208] wherein the first and the third single-stranded DNA sequence each comprise a region of complementarity to the other; and wherein, wherein the second and the fourth single-stranded DNA sequence each comprise a region of complementarity to the other.
[1209] 131. A system for editing one or more double-stranded DNA sequences, the system comprising:
   [1210] e) a first prime editor complex comprising:
      [1211] iii. a first prime editor comprising a first nucleic acid programmable DNA binding protein (first napDNAbp) and a first polypeptide comprising an RNA-dependent DNA polymerase activity; and
      [1212] iv. a first prime editing guide RNA (first PEgRNA) that binds to a first binding site on a first strand of a first double-stranded DNA sequence at a first target site to be edited;
   [1213] f) a second prime editor complex comprising:
      [1214] v. a second prime editor comprising a second nucleic acid programmable DNA binding protein (second napDNAbp) and a second polypeptide comprising an RNA-dependent DNA polymerase activity; and
      [1215] vi. a second prime editing guide RNA (second PEgRNA) that binds to a second binding site on a second strand of the first double-stranded DNA sequence at the first target site to be edited;
   [1216] g) a third prime editor complex comprising:
      [1217] v. a third prime editor comprising a third nucleic acid programmable DNA binding protein (third napDNAbp) and a third polypeptide comprising an RNA-dependent DNA polymerase activity; and
      [1218] vi. a third prime editing guide RNA (third PEgRNA) that binds to a first binding site on a first strand of a second double-stranded DNA sequence at a second target site to be edited;
   [1219] h) a fourth prime editor complex comprising:
      [1220] v. a fourth prime editor comprising a fourth nucleic acid programmable DNA binding protein (fourth napDNAbp) and a fourth polypeptide comprising an RNA-dependent DNA polymerase activity; and
      [1221] vi. a fourth prime editing guide RNA (fourth PEgRNA) that binds to a second binding site on a second strand of the second double-stranded DNA sequence at the second target site to be edited;
         [1222] wherein the first PEgRNA comprises a first DNA synthesis template encoding a first single-stranded DNA sequence, the second PEgRNA comprises a second DNA synthesis template encoding a second single-stranded DNA sequence, the third PEgRNA comprises a third DNA synthesis template encoding a third single-stranded DNA sequence, and the fourth PEgRNA comprises a fourth DNA synthesis template encoding a fourth single-stranded DNA sequence;
         [1223] wherein the first and the third single-stranded DNA sequence each comprise a region of complementarity to the other; and wherein, wherein the second and the fourth single-stranded DNA sequence each comprise a region of complementarity to the other.
[1224] 132. The system of embodiment 130 or 131, wherein the prime editor of the first prime editor complex, the second prime editor complex, the third prime editor complex, an/or the fourth prime editor complex is a fusion protein comprising the napDNAbp and the polypeptide having an RNA-dependent DNA polymerase activity
[1225] 133. The system of any one of embodiments 129-132, wherein
   [1226] (i) the first PEgRNA further comprises a first spacer sequence, first gRNA core, and a first primer binding site;
   [1227] (ii) the second PEgRNA further comprises a second spacer sequence, a second gRNA core, and a second primer binding site;
   [1228] (iii) the third PEgRNA further comprises a third spacer sequence, a third gRNA core, and a third primer binding site; and
   [1229] (iv) the fourth PEgRNA comprises a fourth spacer sequence, a fourth gRNA core, a fourth DNA synthesis template, and a fourth primer binding site.
[1230] 134. The system of embodiment 131, wherein the region of complementarity of the first and third single-stranded DNA sequence, and/or the region of complementarity of the second and fourth single-stranded DNA sequence, form a duplex.
[1231] 135. the system of embodiment 134, wherein the first spacer sequence binds to the first binding site of the first double stranded DNA sequence upstream of the first target site to be edited and the second spacer sequence binds to the second binding site on the first double stranded DNA sequence downstream of the first target site to be edited.
[1232] 136. the system of embodiment 134 or 135, wherein the third spacer sequence binds to the first binding site of the second double stranded DNA sequence upstream of the second target site to be edited and the forth spacer sequence binds to the second binding site on the second double stranded DNA sequence downstream of the second target site to be edited.
[1233] 137. the system of any one of embodiments 134-136, wherein the first and second binding sites define two ends of a first contiguous region of the first double-stranded DNA.
[1234] 138. The system of any one of embodiments 134-137, wherein the third and fourth binding sites define two ends of a second contiguous region of the second double-stranded DNA.
[1235] 139. The system of embodiment 138, wherein the contiguous region between the first and second binding sites or the third and fourth binding sites is least 10 nucleobase pairs, at least 11 nucleobase pairs, at least 12 nucleobase pairs, at least 13 nucleobase pairs, at least 14 nucleobase pairs, at least 15 nucleobase pairs, at least 16 nucleobase pairs, at least 17 nucleobase pairs, at least 18 nucleobase pairs, at least 19 nucleobase pairs, at least 20 nucleobase pairs, at least 21 nucleobase pairs, at least 22 nucleobase pairs, at least 23 nucleobase pairs, at least 24 nucleobase pairs, at least 25 nucleobase pairs, at least 26 nucleobase pairs, at least 27 nucleobase pairs, at least 28 nucleobase pairs, at least 29 nucleobase pairs, at least 30 nucleobase pairs, at least 31 nucleobase pairs, at least 32 nucleobase pairs, at least 33 nucleobase pairs, at least 34 nucleobase pairs, at least 35 nucleobase pairs, at least 36 nucleobase pairs, at least 37 nucleobase pairs, at least 37 nucleobase pairs, at least 38 nucleobase pairs, at least 39 nucleobase pairs, or at least 40 nucleobase pairs, at least 41 nucleotides, at least 42 nucleotides, at least 43 nucleotides, at least 44 nucleotides, at least 45 nucleotides, at least 46 nucleotides, at least 47 nucleotides, at least 48 nucleotides, at least 49 nucleotides, at least 50 nucleotides, at least 51 nucleotides, at least 52 nucleotides, at least 53 nucleotides, at least 54 nucleotides, at least 55 nucleotides, at least 56 nucleotides, at least 57 nucleotides, at least 58 nucleotides, at least 59 nucleotides, at least 60 nucleotides, at least 61 nucleotides, at least 62 nucleotides, at least 63 nucleotides, at least 64 nucleotides, at least 65 nucleotides, at least 66 nucleotides, at least 67 nucleotides, at least 68 nucleotides, at least 69 nucleotides, at least 70 nucleotides, at least 71 nucleotides, at least 72 nucleotides, at least 73 nucleotides, at least 74 nucleotides, at least 75 nucleotides, at least 76 nucleotides, at least 77 nucleotides, at least 78 nucleotides, at least 79 nucleotides, at least 80 nucleotides, at least 81 nucleotides, at least 82 nucleotides, at least 83 nucleotides, at least 84 nucleotides, at least 85 nucleotides, at least 86 nucleotides, at least 87 nucleotides, at least 88 nucleotides, at least 89 nucleotides, at least 90 nucleotides, at least 91 nucleotides, at least 92 nucleotides, at least 93 nucleotides, at least 94 nucleotide at least 95 nucleotides, at least 96 nucleotides, at least 97 nucleotides, at least 98 nucleotides, at least 99 nucleotides, at least 100 nucleotides, at least 101 nucleotides, at least 102 nucleotides, at least 103 nucleotides, at least 104 nucleotides, at least 105 nucleotides, at least 106 nucleotides, at least 107 nucleotides, at least 108 nucleotides, at least 109 nucleotides, or at least 110 nucleotides in length.
[1236] 140. The system of any one of embodiments 134-140, wherein the region of complementarity of the first single-stranded DNA sequence and the second single-stranded DNA sequence, and/or the region of complementarity of the second single-stranded DNA sequence and the fourth single-stranded DNA sequence, form a duplex.
[1237] 141. The system of embodiment 140, wherein the duplex is incorporated in the first double stranded DNA and/or the second double stranded DNA.
[1238] 142. The system of any one of embodiments 134-141, wherein the system results in replacement of the first contiguous region by the second contiguous region into the first double-stranded DNA.
[1239] 143. The system of any one of embodiments 134-141, wherein the system results in exchange of the first contiguous region and the second contiguous region between the first double-stranded DNA and the second double-stranded DNA.
[1240] 144. The system of any one of embodiments 130-143, wherein the first prime editor complex, the second prime editor complex, the third prime editor complex, and the fourth prime editor complex comprise the same prime editor.
[1241] 145. The system of any one of embodiments 130-144, wherein the first, second, third, and fourth polypeptide comprising an RNA-dependent DNA polymerase activity are the same.
[1242] 146. The system of any one of embodiments 130-145, wherein the first, second, third, and/or fourth napDNAbp is a Cas9 domain or variant thereof.
[1243] 147. The system of any one of embodiments 130-146, wherein the first, second, third, and/or fourth napDNAbp is a nuclease active Cas9 domain, a nuclease inactive Cas9 domain, or a Cas9 nickase domain or a variant thereof.
[1244] 148. The system of any one of embodiments 130-147, wherein the first, second, third, and/or fourth napDNAbp is selected from the group consisting of: Cas9, Cas12e, Cas12d, Cas12a, Cas12bl, Cas13a, Cas12c, and Argonaute.
[1245] 149. The system of any one of embodiments 130-148, wherein the first, second, third, and/or fourth napDNAbp has nickase activity.
[1246] 150. The system of any one of embodiments 130-149, wherein the first, second, third, and/or fourth napDNAbp comprises an amino acid sequence of any one of SEQ ID NOs: 2-65, or an amino acid sequence having at least an 80%, 85%, 90%, 95%, or 99% sequence identity with any one of SEQ ID NOs: 2-65.
[1247] 151. The system of any one of embodiments 130-150, wherein the first, second, third, and/or fourth polypeptide having an RNA-dependent DNA polymerase activity is a reverse transcriptase.
[1248] 152. The system of any one of embodiments 130-151, wherein the first, second, third, and/or fourth polypeptide having an RNA-dependent DNA polymerase activity comprises an amino acid sequence of any one of SEQ ID NOs: 37, 68-79, 82-98, 81, 98, and 110 or an amino acid sequence having at least an 80%, 85%, 90%, 95%, or 99% sequence identity with any one of SEQ ID NOs: 37, 68-79, 82-98, 81, 98, and 110.
[1249] 153. The system of any one of embodiments 130-152, wherein
   [1250] (i) the first prime editor further comprises a linker that joins the first napDNAbp and the first polypeptide having the RNA-dependent DNA polymerase activity;
   [1251] (ii) the second prime editor further comprises a linker that joins the second napDNAbp and the second polypeptide having the RNA-dependent DNA polymerase activity;
   [1252] (iii) the third prime editor further comprises a linker that joins the third napDNAbp and the third polypeptide having the RNA-dependent DNA polymerase activity; and/or
   [1253] (iv) the fourth prime editor further comprises a linker that joins the fourth napDNAbp and the fourth polypeptide having the RNA-dependent DNA polymerase activity.
[1254] 154. The system of embodiment 153, wherein the linker comprises an amino acid sequence of any one of SEQ ID NOs: 119-128, or an amino acid sequence having at least an 80%, 85%, 90%, 95%, or 99% sequence identity with any one of SEQ ID NOs: 119-128.
[1255] 155. The system of embodiment 153 or 154, wherein the linker is 1, 2, 3, 4, 5, 6, 7, 8, 9, 10, 11, 12, 13, 14, 15, 16, 17, 18, 19, 20, 21, 22, 23, 24, 25, 26, 27, 28, 29, 30, 31, 32, 33, 34, 35, 36, 38, 38, 39, 40, 41, 42, 43, 44, 45, 46, 47, 48, 49, or 50 amino acids in length.
[1256] 156. The system of any one of embodiments 130-155, wherein the first, second, third, and/or fourth PEgRNA comprises a nucleotide sequence of any one of SEQ ID NOs: 192-203, or a nucleotide sequence having at least an 80%, 85%, 90%, 95%, or 99% sequence identity with any one of SEQ ID NOs: 192-203.
[1257] 157. The system of any one of embodiments 130-156, wherein the first spacer sequence binds to a first binding site on a first strand of the double-stranded DNA sequence upstream from the target site to be edited.
[1258] 158. The system of any one of embodiments 130-157, wherein the second spacer sequence of the second prime editor complex binds to a second binding site on a second strand of the double-stranded DNA sequence upstream from the target site to be edited.
[1259] 159. The system of any one of embodiments 130-158, wherein the third spacer sequence binds to a third binding site on a first strand of the double-stranded DNA sequence downstream from the target site to be edited.
[1260] 160. The system of any one of embodiments 130-159, wherein the fourth spacer sequence of the fourth prime editor complex binds to a fourth binding site on a second strand of the double-stranded DNA sequence downstream from the target site to be edited.
[1261] 161. The system of embodiment 160, wherein the binding of the spacer sequence of the first and second prime editor complexes in the presence of a PAM sequence results in the nicking of the first and second strands, respectively, at a nick site proximal to the PAM sequences on each strand by the first and/or second napDNAbps of each first and second prime editor complexes.
[1262] 162. The system of embodiment 161, wherein the binding of the spacer sequence of the third and fourth prime editor complexes in the presence of a PAM sequence results in the nicking of the first and second strands, respectively, at a nick site proximal to the PAM sequences on each strand by the third and/or fourth napDNAbps of each third and fourth prime editor complexes.
[1263] 163. The system of embodiment 160 or 162, wherein the first and third binding sites, or the second and fourth binding sites, define two ends of a contiguous region of double-stranded DNA.
[1264] 164. The system of embodiment 163, wherein the contiguous region between the first and third binding sites or the second and fourth binding sites is least 10 nucleobase pairs, at least 11 nucleobase pairs, at least 12 nucleobase pairs, at least 13 nucleobase pairs, at least 14 nucleobase pairs, at least 15 nucleobase pairs, at least 16 nucleobase pairs, at least 17 nucleobase pairs, at least 18 nucleobase pairs, at least 19 nucleobase pairs, at least 20 nucleobase pairs, at least 21 nucleobase pairs, at least 22 nucleobase pairs, at least 23 nucleobase pairs, at least 24 nucleobase pairs, at least 25 nucleobase pairs, at least 26 nucleobase pairs, at least 27 nucleobase pairs, at least 28 nucleobase pairs, at least 29 nucleobase pairs, at least 30 nucleobase pairs, at least 31 nucleobase pairs, at least 32 nucleobase pairs, at least 33 nucleobase pairs, at least 34 nucleobase pairs, at least 35 nucleobase pairs, at least 36 nucleobase pairs, at least 37 nucleobase pairs, at least 37 nucleobase pairs, at least 38 nucleobase pairs, at least 39 nucleobase pairs, or at least 40 nucleobase pairs, at least 41 nucleotides, at least 42 nucleotides, at least 43 nucleotides, at least 44 nucleotides, at least 45 nucleotides, at least 46 nucleotides, at least 47 nucleotides, at least 48 nucleotides, at least 49 nucleotides, at least 50 nucleotides, at least 51 nucleotides, at least 52 nucleotides, at least 53 nucleotides, at least 54 nucleotides, at least 55 nucleotides, at least 56 nucleotides, at least 57 nucleotides, at least 58 nucleotides, at least 59 nucleotides, at least 60 nucleotides, at least 61 nucleotides, at least 62 nucleotides, at least 63 nucleotides, at least 64 nucleotides, at least 65 nucleotides, at least 66 nucleotides, at least 67 nucleotides, at least 68 nucleotides, at least 69 nucleotides, at least 70 nucleotides, at least 71 nucleotides, at least 72 nucleotides, at least 73 nucleotides, at least 74 nucleotides, at least 75 nucleotides, at least 76 nucleotides, at least 77 nucleotides, at least 78 nucleotides, at least 79 nucleotides, at least 80 nucleotides, at least 81 nucleotides, at least 82 nucleotides, at least 83 nucleotides, at least 84 nucleotides, at least 85 nucleotides, at least 86 nucleotides, at least 87 nucleotides, at least 88 nucleotides, at least 89 nucleotides, at least 90 nucleotides, at least 91 nucleotides, at least 92 nucleotides, at least 93 nucleotides, at least 94 nucleotide at least 95 nucleotides, at least 96 nucleotides, at least 97 nucleotides, at least 98 nucleotides, at least 99 nucleotides, at least 100 nucleotides, at least 101 nucleotides, at least 102 nucleotides, at least 103 nucleotides, at least 104 nucleotides, at least 105 nucleotides, at least 106 nucleotides, at least 107 nucleotides, at least 108 nucleotides, at least 109 nucleotides, or at least 110 nucleotides in length.
[1265] 165. The system of any one of embodiments 130-164, wherein the region of complementarity of the first single-stranded DNA sequence and the third single-stranded DNA sequence, and/or the region of complementarity of the second single-stranded DNA sequence and the fourth single-stranded DNA sequence, form a duplex.
[1266] 166. The system of embodiment 164 or 165, wherein the contiguous region becomes replaced by the duplex.
[1267] 167. The system of embodiment 164 or 165, wherein the duplex is incorporated in the double-stranded

[1268] DNA at the target site.
[1269] 168. The system of embodiment any one of embodiments 130-167, wherein the first, second, third, and/or fourth DNA synthesis template is at least 1 nucleotide, at least 2 nucleotides, at least 3 nucleotides, at least 4 nucleotides, at least 5 nucleotides, at least 6 nucleotides, at least 7 nucleotides, at least 8 nucleotides, at least 9 nucleotides, at least 10 nucleotides, at least 11 nucleotides, at least 12 nucleotides, at least 13 nucleotides, at least 14 nucleotides, at least 15 nucleotides, at least 16 nucleotides, at least 17 nucleotides, at least 18 nucleotides, at least 19 nucleotides, at least 20 nucleotides, at least 21 nucleotides, at least 22 nucleotides, at least 23 nucleotides, at least 24 nucleotides, at least 25 nucleotides, at least 26 nucleotides, at least 27 nucleotides, at least 28 nucleotides, at least 29 nucleotides, at least 30 nucleotides, at least 31 nucleotides, at least 32 nucleotides, at least 33 nucleotides, at least 34 nucleotides, at least 35 nucleotides, at least 36 nucleotides, at least 37 nucleotides, at least 38 nucleotides, at least 39 nucleotides, at least 40 nucleotides, at least 41 nucleotides, at least 42 nucleotides, at least 43 nucleotides, at least 44 nucleotides, at least 45 nucleotides, at least 46 nucleotides, at least 47 nucleotides, at least 48 nucleotides, at least 49 nucleotides, at least 50 nucleotides, at least 51 nucleotides, at least 52 nucleotides, at least 53 nucleotides, at least 54 nucleotides, at least 55 nucleotides, at least 56 nucleotides, at least 57 nucleotides, at least 58 nucleotides, at least 59 nucleotides, at least 60 nucleotides, at least 61 nucleotides, at least 62 nucleotides, at least 63 nucleotides, at least 64 nucleotides, at least 65 nucleotides, at least 66 nucleotides, at least 67 nucleotides, at least 68 nucleotides, at least 69 nucleotides, at least 70 nucleotides, at least 71 nucleotides, at least 72 nucleotides, at least 73 nucleotides, at least 74 nucleotides, at least 75 nucleotides, at least 76 nucleotides, at least 77 nucleotides, at least 78 nucleotides, at least 79 nucleotides, at least 80 nucleotides, at least 81 nucleotides, at least 82 nucleotides, at least 83 nucleotides, at least 84 nucleotides, at least 85 nucleotides, at least 86 nucleotides, at least 87 nucleotides, at least 88 nucleotides, at least 89 nucleotides, at least 90 nucleotides, at least 91 nucleotides, at least 92 nucleotides, at least 93 nucleotides, at least 94 nucleotide at least 95 nucleotides, at least 96 nucleotides, at least 97 nucleotides, at least 98 nucleotides, at least 99 nucleotides, at least 100 nucleotides, at least 101 nucleotides, at least 102 nucleotides, at least 103 nucleotides, at least 104 nucleotides, at least 105 nucleotides, at least 106 nucleotides, at least 107 nucleotides, at least 108 nucleotides, at least 109 nucleotides, or at least 110 nucleotides in length.
[1270] 169. The system of any one of embodiments 130-168, wherein the first single-stranded DNA sequence and the second single-stranded DNA sequence, and/or the third single-stranded DNA sequence and the fourth single-stranded DNA sequence, have the same lengths.
[1271] 170. The system of any one of embodiments 130-168, wherein the first single-stranded DNA sequence and the second single-stranded DNA sequence, and/or the third single-stranded DNA sequence and the fourth single-stranded DNA sequence, have different lengths.
[1272] 171. The system of any one of embodiments 130-170, wherein the region of complementarity of the first, second, third, and/or fourth single-stranded DNA sequence is at least 99%, at least 95%, at least 90%, at least 85%, at least 80%, at least 75%, at least 70%, at least 65%, at least 60%, at least 55%, at least 50%, at least 45%, at least 40%, at least 35%, at least 30%, at least 25%, at least 20%, at least 15%, or at least 10% of the total length of the first single-stranded DNA sequence and the third single-stranded DNA sequence, or the second single-stranded DNA sequence and the fourth single-stranded DNA sequence.
[1273] 172. The system of any one of embodiments 130-171, wherein the region of complementarity of the first, second, third, and/or fourth single-stranded DNA sequence is at least 5 nucleotides, at least 6 nucleotides, at least 7 nucleotides, at least 8 nucleotides, at least 9 nucleotides, at least 10 nucleotides, at least 11 nucleotides, at least 12 nucleotides, at least 13 nucleotides, at least 14 nucleotides, at least 15 nucleotides, at least 16 nucleotides, at least 17 nucleotides, at least 18 nucleotides, at least 19 nucleotides, at least 20 nucleotides, at least 21 nucleotides, at least 22 nucleotides, at least 23 nucleotides, at least 24 nucleotides, at least 25 nucleotides, at least 26 nucleotides, at least 27 nucleotides, at least 28 nucleotides, at least 29 nucleotides, at least 30 nucleotides, at least 31 nucleotides, at least 32 nucleotides, at least 33 nucleotides, at least 34 nucleotides, at least 35 nucleotides, at least 36 nucleotides, at least 37 nucleotides, at least 38 nucleotides, at least 39 nucleotides, at least 40 nucleotides, at least 41 nucleotides, at least 42 nucleotides, at least 43 nucleotides, at least 44 nucleotides, at least 45 nucleotides, at least 46 nucleotides, at least 47 nucleotides, at least 48 nucleotides, at least 49 nucleotides, at least 50 nucleotides, at least 51 nucleotides, at least 52 nucleotides, at least 53 nucleotides, at least 54 nucleotides, at least 55 nucleotides, at least 56 nucleotides, at least 57 nucleotides, at least 58 nucleotides, at least 59 nucleotides, at least 60 nucleotides, at least 61 nucleotides, at least 62 nucleotides, at least 63 nucleotides, at least 64 nucleotides, at least 65 nucleotides, at least 66 nucleotides, at least 67 nucleotides, at least 68 nucleotides, at least 69 nucleotides, at least 70 nucleotides, at least 71 nucleotides, at least 72 nucleotides, at least 73 nucleotides, at least 74 nucleotides, at least 75 nucleotides, at least 76 nucleotides, at least 77 nucleotides, at least 78 nucleotides, at least 79 nucleotides, at least 80 nucleotides, at least 81 nucleotides, at least 82 nucleotides, at least 83 nucleotides, at least 84 nucleotides, at least 85 nucleotides, at least 86 nucleotides, at least 87 nucleotides, at least 88 nucleotides, at least 89 nucleotides, at least 90 nucleotides, at least 91 nucleotides, at least 92 nucleotides, at least 93 nucleotides, at least 94 nucleotide at least 95 nucleotides, at least 96 nucleotides, at least 97 nucleotides, at least 98 nucleotides, at least 99 nucleotides, at least 100 nucleotides, at least 101 nucleotides, at least 102 nucleotides, at least 103 nucleotides, at least 104 nucleotides, at least 105 nucleotides, at least 106 nucleotides, at least 107 nucleotides, at least 108 nucleotides, at least 109 nucleotides, or at least 110 nucleotides in length, and is either less than or equal to the length of the first single-stranded DNA sequence and the third single-stranded DNA sequence, and the second single-stranded DNA sequence and the fourth single-stranded DNA sequence.
[1274] 173. The system of any one of embodiments 130-172, wherein the first, second, third, and fourth single-stranded DNA sequence are each single-stranded DNA strands having 3′ ends.
[1275] 174. The system of embodiment 167, wherein the incorporation of the duplex comprising the edited portion results in an insertion, deletion, or replacement of DNA at the target site.
[1276] 175. A polynucleotide encoding the first, second, third, and fourth prime editors of any one of embodiments 130-174.
[1277] 176. A polynucleotide encoding the first, second, third, and fourth PEgRNA of any of embodiments 130-174.
[1278] 177. A vector comprising a polynucleotide of embodiment 175 or 176.
[1279] 178. A cell comprising a polynucleotide of embodiment 175 or 176 or a vector of embodiment 177.
[1280] 179. A pharmaceutical composition comprising a polynucleotide of embodiment 175 or 176, a vector of embodiment 177, or a cell of embodiment 178, and a pharmaceutical excipient.
[1281] 180. A kit comprising a polynucleotide of embodiment 175 or 176 or a vector of embodiment 177 and instructions for simultaneously editing both strands of a double-stranded DNA sequence at a target site to be edited.
[1282] 181. A method for simultaneously editing first and second complementary strands of a double-stranded DNA sequence at a target site, the method comprising contacting the double-stranded DNA sequence with a pair of prime editor complexes, the pair comprising:
   [1283] (a) a first prime editor complex, comprising:
      [1284] i. a first prime editor comprising a first nucleic acid programmable DNA binding protein (first napDNAbp) and a first polypeptide comprising an RNA-dependent DNA polymerase activity; and
      [1285] ii. a first prime editing guide RNA (first PEgRNA) that binds to a first target sequence on the first strand of the genomic DNA sequence upstream of the target site;
   [1286] (b) a second prime editor complex, comprising:
      [1287] i. a second prime editor comprising a second nucleic acid programmable DNA binding protein (second napDNAbp) and a second polypeptide comprising an RNA-dependent DNA polymerase activity; and
      [1288] ii. a second prime editing guide RNA (second PEgRNA) that binds to a second target sequence on the second strand of the genomic DNA sequence upstream of the target site;
   [1289] (c) a third prime editor complex, comprising:
      [1290] i. a third prime editor comprising a third nucleic acid programmable DNA binding protein (third napDNAbp) and a third polypeptide comprising an RNA-dependent DNA polymerase activity; and
      [1291] ii. a third prime editing guide RNA (third PEgRNA) that binds to a third target sequence on the first strand of the genomic DNA sequence downstream of the target site;
   [1292] (d) a fourth prime editor complex, comprising:
      [1293] i. a fourth prime editor comprising a second nucleic acid programmable DNA binding protein (fourth napDNAbp) and a fourth polypeptide comprising an RNA-dependent DNA polymerase activity; and
      [1294] ii. a fourth prime editing guide RNA (fourth PEgRNA) that binds to a fourth target sequence on the second strand of the genomic DNA sequence downstream of the target site;
   [1295] wherein the first prime editor complex causes a first nick at the first target sequence and the subsequent polymerization of a first single-stranded DNA sequence having a 3′-end from the available 5′-end formed by the first nick;
   [1296] wherein the second prime editor complex causes a second nick at the second target sequence and the subsequent polymerization of a second single-stranded DNA sequence having a 3′-end from the available 5′-end formed by the second nick;
   [1297] wherein the third prime editor complex causes a third nick at the third target sequence and the subsequent polymerization of a third single-stranded DNA sequence having a 3′-end from the available 5′-end formed by the third nick;
   [1298] wherein the fourth prime editor complex causes a fourth nick at the fourth target sequence and the subsequent polymerization of a fourth single-stranded DNA sequence having a 3′-end from the available 5′-end formed by the fourth nick;
   [1299] wherein the first single-stranded DNA sequence and the second single-stranded DNA sequence are reverse complements over at least a region of complementarity and form a duplex, wherein the duplex replaces the nicked first and second complementary strands of the double-stranded DNA sequence; and
   [1300] wherein the third single-stranded DNA sequence and the fourth single-stranded DNA sequence are reverse complements over at least a region of complementarity and form a duplex, wherein the duplex replaces the nicked first and second complementary strands of the double-stranded DNA sequence.
[1301] 182. The method of embodiment 181, wherein the prime editor of the first prime editor complex, the second prime editor complex, the third prime editor complex, and/or the fourth prime editor complex is a fusion protein comprising the napDNAbp and the polypeptide having an RNA-dependent DNA polymerase activity.
[1302] 183. The method of embodiment 181 or 182, wherein the first prime editor complex, the second prime editor complex, the third prime editor complex, and the fourth prime editor complex comprise the same prime editor.
[1303] 184. The method of embodiment 181 or 182, wherein the first, second, third, and/or fourth prime editor complex comprise a different prime editor.
[1304] 185. The method of any one of embodiments 181-184, wherein first, second, third, and/or fourth napDNAbp is a Cas9 domain or variant thereof.
[1305] 186. The method of any one of embodiments 181-185, wherein first, second, third, and/or fourth napDNAbp is a nuclease active Cas9 domain, a nuclease inactive Cas9 domain, or a Cas9 nickase domain or variant thereof.
[1306] 187. The method of any one of embodiments 181-184, wherein the first, second, third, and/or fourth napDNAbp is selected from the group consisting of: Cas9, Cas12e, Cas12d, Cas12a, Cas12b1, Cas13a, Cas12c.
[1307] 188. The method of any one of embodiments 181-187, wherein the first, second, third, and/or fourth napDNAbp has a nickase activity.
[1308] 189. The method of any one of embodiments 181-188, wherein the first, second, third, and/or fourth napDNAbp comprises an amino acid sequence of any one of SEQ ID NOs: 2-65, or an amino acid sequence having at least an 80%, 85%, 90%, 95%, or 99% sequence identity with any one of SEQ ID NOs: 2-65.
[1309] 190. The method of any one of embodiments 181-189, wherein the first, second, third, and/or fourth polypeptide having an RNA-dependent DNA polymerase activity is a reverse transcriptase.
[1310] 191. The method of any one of embodiments 181-190, wherein the first, second, third, and/or fourth polypeptide having an RNA-dependent DNA polymerase activity comprises an amino acid sequence of any one of SEQ ID NOs: 37, 68-79, 82-98, 81, 98, and 110 or an amino acid sequence having at least an 80%, 85%, 90%, 95%, or 99% sequence identity with any one of SEQ ID NOs: 37, 68-79, 82-98, 81, 98, and 110.
[1311] 192. The method of any one of embodiments 181-191, wherein
   [1312] (i) the first prime editor further comprises a linker that joins the first napDNAbp and the first polypeptide having the RNA-dependent DNA polymerase activity;
   [1313] (ii) the second prime editor further comprises a linker that joins the second napDNAbp and the second polypeptide having the RNA-dependent DNA polymerase activity;
   [1314] (iii) the third prime editor further comprises a linker that joins the third napDNAbp and the third polypeptide having the RNA-dependent DNA polymerase activity; and/or
   [1315] (iv) the fourth prime editor further comprises a linker that joins the fourth napDNAbp and the fourth polypeptide having the RNA-dependent DNA polymerase activity.

[1316] 193. The method of embodiment 192, wherein the linker comprises an amino acid sequence of any one of SEQ ID NOs: 119-128, or an amino acid sequence having at least an 80%, 85%, 90%, 95%, or 99% sequence identity with any one of SEQ ID NOs: 119-128.
[1317] 194. The method of embodiment 192 or 193, wherein the linker is 1, 2, 3, 4, 5, 6, 7, 8, 9, 10, 11, 12, 13, 14, 15, 16, 17, 18, 19, 20, 21, 22, 23, 24, 25, 26, 27, 28, 29, 30, 31, 32, 33, 34, 35, 36, 38, 38, 39, 40, 41, 42, 43, 44, 45, 46, 47, 48, 49, or 50 amino acids in length.
[1318] 195. The method of any one of embodiments 181-191, wherein the first, second, third, and/or fourth PEgRNA comprises a nucleotide sequence of any one of SEQ ID NOs: 192-203, or a nucleotide sequence having at least an 80%, 85%, 90%, 95%, or 99% sequence identity with any one of SEQ ID NOs: 192-203.
[1319] 196. The method of any one of embodiments 181-195, wherein the first spacer sequence of the first prime editor complex binds to a first binding site on a first strand of the double-stranded DNA sequence upstream from the target site to be edited.
[1320] 197. The method of any one of embodiments 181-196, wherein the second spacer sequence of the second prime editor complex binds to a second binding site on a second strand of the double-stranded DNA sequence downstream from the target site to be edited.
[1321] 198. The method of any one of embodiments 181-197, wherein the third spacer sequence of the third prime editor complex binds to a third binding site on a first strand of the double-stranded DNA sequence upstream from the target site to be edited.
[1322] 199. The method of any one of embodiments 181-198, wherein the fourth spacer sequence of the fourth prime editor complex binds to a fourth binding site on a second strand of the double-stranded DNA sequence downstream from the target site to be edited.
[1323] 200. The method of embodiment 197, wherein the binding of the first and second spacer sequences of the first and second prime editor complexes in the presence of a PAM sequence results in the nicking of the first and second strands, respectively, at a nick site proximal to the PAM sequence on each strand by the napDNAbps of each first and second prime editor complex.
[1324] 201. The method of embodiment 199, wherein the binding of the third and fourth spacer sequences of the third and fourth prime editor complexes in the presence of a PAM sequence results in the nicking of the first and second strands, respectively, at a nick site proximal to the PAM sequence on each strand by the napDNAbps of each third and fourth prime editor complex.
[1325] 202. The method of embodiment 200 or 201, wherein the first and second binding sites, and/or the third and fourth binding sites, define two ends of a contiguous region of double-stranded DNA comprising the target site to be edited.
[1326] 203. The method of embodiment 202, wherein the contiguous region between the first and second binding sites, and/or the contiguous region between the third and fourth binding sites, is least 10 nucleobase pairs, at least 11 nucleobase pairs, at least 12 nucleobase pairs, at least 13 nucleobase pairs, at least 14 nucleobase pairs, at least 15 nucleobase pairs, at least 16 nucleobase pairs, at least 17 nucleobase pairs, at least 18 nucleobase pairs, at least 19 nucleobase pairs, at least 20 nucleobase pairs, at least 21 nucleobase pairs, at least 22 nucleobase pairs, at least 23 nucleobase pairs, at least 24 nucleobase pairs, at least 25 nucleobase pairs, at least 26 nucleobase pairs, at least 27 nucleobase pairs, at least 28 nucleobase pairs, at least 29 nucleobase pairs, at least 30 nucleobase pairs, at least 31 nucleobase pairs, at least 32 nucleobase pairs, at least 33 nucleobase pairs, at least 34 nucleobase pairs, at least 35 nucleobase pairs, at least 36 nucleobase pairs, at least 37 nucleobase pairs, at least 37 nucleobase pairs, at least 38 nucleobase pairs, at least 39 nucleobase pairs, or at least 40 nucleobase pairs, at least 41 nucleotides, at least 42 nucleotides, at least 43 nucleotides, at least 44 nucleotides, at least 45 nucleotides, at least 46 nucleotides, at least 47 nucleotides, at least 48 nucleotides, at least 49 nucleotides, at least 50 nucleotides, at least 51 nucleotides, at least 52 nucleotides, at least 53 nucleotides, at least 54 nucleotides, at least 55 nucleotides, at least 56 nucleotides, at least 57 nucleotides, at least 58 nucleotides, at least 59 nucleotides, at least 60 nucleotides, at least 61 nucleotides, at least 62 nucleotides, at least 63 nucleotides, at least 64 nucleotides, at least 65 nucleotides, at least 66 nucleotides, at least 67 nucleotides, at least 68 nucleotides, at least 69 nucleotides, at least 70 nucleotides, at least 71 nucleotides, at least 72 nucleotides, at least 73 nucleotides, at least 74 nucleotides, at least 75 nucleotides, at least 76 nucleotides, at least 77 nucleotides, at least 78 nucleotides, at least 79 nucleotides, at least 80 nucleotides, at least 81 nucleotides, at least 82 nucleotides, at least 83 nucleotides, at least 84 nucleotides, at least 85 nucleotides, at least 86 nucleotides, at least 87 nucleotides, at least 88 nucleotides, at least 89 nucleotides, at least 90 nucleotides, at least 91 nucleotides, at least 92 nucleotides, at least 93 nucleotides, at least 94 nucleotide at least 95 nucleotides, at least 96 nucleotides, at least 97 nucleotides, at least 98 nucleotides, at least 99 nucleotides, at least 100 nucleotides, at least 101 nucleotides, at least 102 nucleotides, at least 103 nucleotides, at least 104 nucleotides, at least 105 nucleotides, at least 106 nucleotides, at least 107 nucleotides, at least 108 nucleotides, at least 109 nucleotides, or at least 110 nucleotides in length.
[1327] 204. The method of embodiment 202 or 203, wherein the contiguous region becomes replaced by the duplex.
[1328] 205. The method of any one of embodiments 181-204, wherein the first, second, third, and/or fourth

[1329] DNA synthesis template is at least 1 nucleotide, at least 2 nucleotides, at least 3 nucleotides, at least 4 nucleotides, at least 5 nucleotides, at least 6 nucleotides, at least 7 nucleotides, at least 8 nucleotides, at least 9 nucleotides, at least 10 nucleotides, at least 11 nucleotides, at least 12 nucleotides, at least 13 nucleotides, at least 14 nucleotides, at least 15 nucleotides, at least 16 nucleotides, at least 17 nucleotides, at least 18 nucleotides, at least 19 nucleotides, at least 20 nucleotides, at least 21 nucleotides, at least 22 nucleotides, at least 23 nucleotides, at least 24 nucleotides, at least 25 nucleotides, at least 26 nucleotides, at least 27 nucleotides, at least 28 nucleotides, at least 29 nucleotides, at least 30 nucleotides, at least 31 nucleotides, at least 32 nucleotides, at least 33 nucleotides, at least 34 nucleotides, at least 35 nucleotides, at least 36 nucleotides, at least 37 nucleotides, at least 38 nucleotides, at least 39 nucleotides, at least 40 nucleotides, at least 41 nucleotides, at least 42 nucleotides, at least 43 nucleotides, at least 44 nucleotides, at least 45 nucleotides, at least 46 nucleotides, at least 47 nucleotides, at least 48 nucleotides, at least 49 nucleotides, at least 50 nucleotides, at least 51 nucleotides, at least 52 nucleotides, at least 53 nucleotides, at least 54 nucleotides, at least 55 nucleotides, at least 56 nucleotides, at least 57 nucleotides, at least 58 nucleotides, at least 59 nucleotides, at least 60 nucleotides, at least 61 nucleotides, at least 62 nucleotides, at least 63 nucleotides, at least 64 nucleotides, at least 65 nucleotides, at least 66 nucleotides, at least 67 nucleotides, at least 68 nucleotides, at least 69 nucleotides, at least 70 nucleotides, at least 71 nucleotides, at least 72 nucleotides, at least 73 nucleotides, at least 74 nucleotides, at least 75 nucleotides, at least 76 nucleotides, at least 77 nucleotides, at least 78 nucleotides, at least 79 nucleotides, at least 80 nucleotides, at least 81 nucleotides, at least 82 nucleotides, at least 83 nucleotides, at least 84 nucleotides, at least 85 nucleotides, at least 86 nucleotides, at least 87 nucleotides, at least 88 nucleotides, at least 89 nucleotides, at least 90 nucleotides, at least 91 nucleotides, at least 92 nucleotides, at least 93 nucleotides, at least 94 nucleotide at least 95 nucleotides, at least 96 nucleotides, at least 97 nucleotides, at least 98 nucleotides, at least 99 nucleotides, at least 100 nucleotides, at least 101 nucleotides, at least 102 nucleotides, at least 103 nucleotides, at least 104 nucleotides, at least 105 nucleotides, at least 106 nucleotides, at least 107 nucleotides, at least 108 nucleotides, at least 109 nucleotides, or at least 110 nucleotides in length.
[1330] 206. The method of any one of embodiments 181-205, wherein the first single-stranded DNA sequence and the second single-stranded DNA sequence, and/or the third single-stranded-DNA sequence and the fourth single-stranded DNA sequence, have the same lengths.
[1331] 207. The method of any one of embodiments 181-206, wherein the first single-stranded DNA sequence and the second single-stranded DNA sequence, and/or the third single-stranded-DNA sequence and the fourth single-stranded DNA sequence, have different lengths.
[1332] 208. The method of any one of embodiments 181-207, wherein the region of complementarity is at least 99%, at least 95%, at least 90%, at least 85%, at least 80%, at least 75%, at least 70%, at least 65%, at least 60%, at least 55%, at least 50%, at least 45%, at least 40%, at least 35%, at least 30%, at least 25%, at least 20%, at least 15%, or at least 10% of the total length of the first single-stranded DNA sequence and the second single-stranded DNA sequence, or the third single-stranded DNA sequence and the fourth single-stranded DNA sequence.
[1333] 209. The method of any one of embodiments 181-208, wherein the region of complementarity is at least 5 nucleotides, at least 6 nucleotides, at least 7 nucleotides, at least 8 nucleotides, at least 9 nucleotides, at least 10 nucleotides, at least 11 nucleotides, at least 12 nucleotides, at least 13 nucleotides, at least 14 nucleotides, at least 15 nucleotides, at least 16 nucleotides, at least 17 nucleotides, at least 18 nucleotides, at least 19 nucleotides, at least 20 nucleotides, at least 21 nucleotides, at least 22 nucleotides, at least 23 nucleotides, at least 24 nucleotides, at least 25 nucleotides, at least 26 nucleotides, at least 27 nucleotides, at least 28 nucleotides, at least 29 nucleotides, at least 30 nucleotides, at least 31 nucleotides, at least 32 nucleotides, at least 33 nucleotides, at least 34 nucleotides, at least 35 nucleotides, at least 36 nucleotides, at least 37 nucleotides, at least 38 nucleotides, at least 39 nucleotides, at least 40 nucleotides, at least 41 nucleotides, at least 42 nucleotides, at least 43 nucleotides, at least 44 nucleotides, at least 45 nucleotides, at least 46 nucleotides, at least 47 nucleotides, at least 48 nucleotides, at least 49 nucleotides, at least 50 nucleotides, at least 51 nucleotides, at least 52 nucleotides, at least 53 nucleotides, at least 54 nucleotides, at least 55 nucleotides, at least 56 nucleotides, at least 57 nucleotides, at least 58 nucleotides, at least 59 nucleotides, at least 60 nucleotides, at least 61 nucleotides, at least 62 nucleotides, at least 63 nucleotides, at least 64 nucleotides, at least 65 nucleotides, at least 66 nucleotides, at least 67 nucleotides, at least 68 nucleotides, at least 69 nucleotides, at least 70 nucleotides, at least 71 nucleotides, at least 72 nucleotides, at least 73 nucleotides, at least 74 nucleotides, at least 75 nucleotides, at least 76 nucleotides, at least 77 nucleotides, at least 78 nucleotides, at least 79 nucleotides, at least 80 nucleotides, at least 81 nucleotides, at least 82 nucleotides, at least 83 nucleotides, at least 84 nucleotides, at least 85 nucleotides, at least 86 nucleotides, at least 87 nucleotides, at least 88 nucleotides, at least 89 nucleotides, at least 90 nucleotides, at least 91 nucleotides, at least 92 nucleotides, at least 93 nucleotides, at least 94 nucleotide at least 95 nucleotides, at least 96 nucleotides, at least 97 nucleotides, at least 98 nucleotides, at least 99 nucleotides, at least 100 nucleotides, at least 101 nucleotides, at least 102 nucleotides, at least 103 nucleotides, at least 104 nucleotides, at least 105 nucleotides, at least 106 nucleotides, at least 107 nucleotides, at least 108 nucleotides, at least 109 nucleotides, or at least 110 nucleotides in length.
[1334] 210. The method of any one of embodiments 181-209, wherein the region of complementarity of the first single-stranded DNA sequence and the second single-stranded DNA sequence, and/or the third single-stranded-DNA sequence and the fourth single-stranded DNA sequence, form the duplex.
[1335] 211. The method of any one of embodiments 181-210, wherein the first single-stranded DNA sequence and the second single-stranded DNA sequence, and/or the third single-stranded-DNA sequence and the fourth single-stranded DNA sequence, are each single-stranded DNA strands having 3′ ends.
[1336] 212. The method of embodiment 204, wherein the replacement of the contiguous region by the duplex comprising the edited portion results in an insertion, deletion, or replacement of DNA at the target site.
[1337] 213. The method of any one of embodiments 181-212, wherein the first single-stranded DNA sequence and the second single-stranded DNA sequence are on ends of a target DNA sequence, and wherein the third single-stranded DNA sequence and the fourth single-stranded DNA sequence are on opposite ends of the same target DNA sequence.
[1338] 214. The method of embodiment 213, wherein the target DNA sequence is inverted.
[1339] 215. The method of any one of embodiments 181-214 further comprising providing a circular DNA donor.
[1340] 216. The method of embodiment 215, wherein the first single-stranded DNA sequence and the third single-stranded DNA sequence are on opposite ends of the target DNA sequence, and wherein the second single-stranded DNA sequence and the fourth single-stranded DNA sequence are on the circular DNA donor.
[1341] 217. The method of embodiment 216, wherein a portion of the circular DNA donor between the second single-stranded DNA sequence and the fourth single-stranded DNA sequence replaces the target sequence between the first single-stranded DNA sequence and the third single-stranded DNA sequence.
[1342] 218. The method of any one of embodiments 181-214, wherein the first single-stranded DNA sequence and the third single-stranded DNA sequence are on a first nucleic acid molecule, and wherein the second single-stranded DNA sequence and the fourth single-stranded DNA sequence are on a second nucleic acid molecule.
[1343] 219. The method of embodiment 218, wherein a portion of the first nucleic acid molecule between the first single-stranded DNA sequence and the third single-stranded DNA sequence is incorporated into the second nucleic acid molecule, and wherein a portion of the second nucleic acid molecule between the second single-stranded DNA sequence and the fourth single-stranded DNA sequence is incorporated into the first nucleic acid molecule.
[1344] 220. The method of embodiment 218 or 219, wherein the first nucleic acid molecule is a first chromosome, and the second nucleic acid molecule is a second chromosome.
[1345] 221. A set of PEgRNAs for use in multi-flap prime editing, wherein the PEgRNAs comprise:
   [1346] (a) a first prime editing guide RNA (first PEgRNA) that binds to a first binding site on a first strand of a double-stranded DNA sequence upstream of a target site to be edited, wherein the first PEgRNA comprises a first spacer sequence, first gRNA core, a first DNA synthesis template, and a first primer binding site, wherein the first DNA synthesis template encodes a first single-stranded DNA sequence;
   [1347] (b) a second prime editing guide RNA (second PEgRNA) that binds to a second binding site on a second strand of the double-stranded DNA sequence upstream of the target site to be edited, wherein the second PEgRNA comprises a second spacer sequence, second gRNA core, a second DNA synthesis template, and a second primer binding site, wherein the second DNA synthesis template encodes a second single-stranded DNA sequence comprising the edited portion, wherein the second single-stranded DNA sequence is complementary to the first single-stranded DNA sequence.
   [1348] (c) a third prime editing guide RNA (third PEgRNA) that binds to a third binding site on a first strand of a double-stranded DNA sequence downstream of a target site to be edited, wherein the third PEgRNA comprises a third spacer sequence, third gRNA core, a third DNA synthesis template, and a third primer binding site, wherein the third DNA synthesis template encodes a third single-stranded DNA sequence;
   [1349] (d) a fourth prime editing guide RNA (fourth PEgRNA) that binds to a fourth binding site on a second strand of the double-stranded DNA sequence downstream of the target site to be edited, wherein the fourth PEgRNA comprises a fourth spacer sequence, fourth gRNA core, a fourth DNA synthesis template, and a fourth primer binding site, wherein the fourth DNA synthesis template encodes a fourth single-stranded DNA sequence, wherein the fourth single-stranded DNA sequence comprises a region of complementarity to the third single-stranded DNA sequence.

[1350] 222. The set of PEgRNAs of embodiment 221, wherein
[1351] the first PEgRNA comprises the structure:
[1352] 5′-[first gRNA spacer sequence]-[first gRNA core]-[first DNA synthesis template]-[first primer binding site]-3′;
[1353] the second PEgRNA comprises the structure:
[1354] 5′-[second gRNA spacer sequence]-[second gRNA core]-[second DNA synthesis template]-[second primer binding site]-3′;
[1355] the third PEgRNA comprises the structure:
[1356] 5′-[third gRNA spacer sequence]-[third gRNA core]-[third DNA synthesis template]-[third primer binding site]-3′; and
[1357] the fourth PEgRNA comprises the structure:
[1358] 5′-[fourth gRNA spacer sequence]-[fourth gRNA core]-[fourth DNA synthesis template]-[fourth primer binding site]-3′.
[1359] 223. The set of PEgRNAs of embodiment 221 or 222, wherein the first single-stranded DNA sequence and the second single-stranded DNA sequence, and/or the third single-stranded DNA sequence and the fourth single-straded DNA sequence, form a duplex that becomes integrated into the double-stranded DNA sequence at the target site to be edited.
[1360] 224. The set of PEgRNAs of any one of embodiments 221-223, wherein the integration of the duplex results in an insertion, deletion, or replacement of DNA at the target site.
[1361] 225. The set of PEgRNAs of embodiment 224, wherein the insertion is at least 1 nucleotide, at least 2 nucleotides, at least 3 nucleotides, at least 4 nucleotides, at least 5 nucleotides, at least 6 nucleotides, at least 7 nucleotides, at least 8 nucleotides, at least 9 nucleotides, at least 10 nucleotides, at least 11 nucleotides, at least 12 nucleotides, at least 13 nucleotides, at least 14 nucleotides, at least 15 nucleotides, at least 16 nucleotides, at least 17 nucleotides, at least 18 nucleotides, at least 19 nucleotidesis, at least 20 nucleotides, at least 21 nucleotides, at least 22 nucleotides, at least 23 nucleotides, at least 24 nucleotides, at least 25 nucleotides, at least 26 nucleotides, at least 27 nucleotides, at least 28 nucleotides, at least 29 nucleotides, at least 30 nucleotides, at least 31 nucleotides, at least 32 nucleotides, at least 33 nucleotides, at least 34 nucleotides, at least 35 nucleotides, at least 36 nucleotides, at least 37 nucleotides, at least 38 nucleotides, at least 39 nucleotides, at least 40 nucleotides, at least 41 nucleotides, at least 42 nucleotides, at least 43 nucleotides, at least 44 nucleotides, at least 45 nucleotides, at least 46 nucleotides, at least 47 nucleotides, at least 48 nucleotides, at least 49 nucleotides, at least 50 nucleotides, at least 51 nucleotides, at least 52 nucleotides, at least 53 nucleotides, at least 54 nucleotides, at least 55 nucleotides, at least 56 nucleotides, at least 57 nucleotides, at least 58 nucleotides, at least 59 nucleotides, at least 60 nucleotides, at least 61 nucleotides, at least 62 nucleotides, at least 63 nucleotides, at least 64 nucleotides, at least 65 nucleotides, at least 66 nucleotides, at least 67 nucleotides, at least 68 nucleotides, at least 69 nucleotides, at least 70 nucleotides, at least 71 nucleotides, at least 72 nucleotides, at least 73 nucleotides, at least 74 nucleotides, at least 75 nucleotides, at least 76 nucleotides, at least 77 nucleotides, at least 78 nucleotides, at least 79 nucleotides, at least 80 nucleotides, at least 81 nucleotides, at least 82 nucleotides, at least 83 nucleotides, at least 84 nucleotides, at least 85 nucleotides, at least 86 nucleotides, at least 87 nucleotides, at least 88 nucleotides, at least 89 nucleotides, at least 90 nucleotides, at least 91 nucleotides, at least 92 nucleotides, at least 93 nucleotides, at least 94 nucleotide at least 95 nucleotides, at least 96 nucleotides, at least 97 nucleotides, at least 98 nucleotides, at least 99 nucleotides, at least 100 nucleotides, at least 101 nucleotides, at least 102 nucleotides, at least 103 nucleotides, at least 104 nucleotides, at least 105 nucleotides, at least 106 nucleotides, at least 107 nucleotides, at least 108 nucleotides, at least 109 nucleotides, or at least 110 nucleotides in length.
[1362] 226. The set of PEgRNAs of embodiment 224, wherein the deletion is at least 1 nucleotide, at least 2 nucleotides, at least 3 nucleotides, at least 4 nucleotides, at least 5 nucleotides, at least 6 nucleotides, at least 7 nucleotides, at least 8 nucleotides, at least 9 nucleotides, at least 10 nucleotides, at least 11 nucleotides, at least 12 nucleotides, at least 13 nucleotides, at least 14 nucleotides, at least 15 nucleotides, at least 16 nucleotides, at least 17 nucleotides, at least 18 nucleotides, at least 19 nucleotides is at least 20 nucleotides, at least 21 nucleotides, at least 22 nucleotides, at least 23 nucleotides, at least 24 nucleotides, at least 25 nucleotides, at least 26 nucleotides, at least 27 nucleotides, at least 28 nucleotides, at least 29 nucleotides, at least 30 nucleotides, at least 31 nucleotides, at least 32 nucleotides, at least 33 nucleotides, at least 34 nucleotides, at least 35 nucleotides, at least 36 nucleotides, at least 37 nucleotides, at least 38 nucleotides, at least 39 nucleotides, at least 40 nucleotides, at least 41 nucleotides, at least 42 nucleotides, at least 43 nucleotides, at least 44 nucleotides, at least 45 nucleotides, at least 46 nucleotides, at least 47 nucleotides, at least 48 nucleotides, at least 49 nucleotides, at least 50 nucleotides, at least 51 nucleotides, at least 52 nucleotides, at least 53 nucleotides, at least 54 nucleotides, at least 55 nucleotides, at least 56 nucleotides, at least 57 nucleotides, at least 58 nucleotides, at least 59 nucleotides, at least 60 nucleotides, at least 61 nucleotides, at least 62 nucleotides, at least 63 nucleotides, at least 64 nucleotides, at least 65 nucleotides, at least 66 nucleotides, at least 67 nucleotides, at least 68 nucleotides, at least 69 nucleotides, at least 70 nucleotides, at least 71 nucleotides, at least 72 nucleotides, at least 73 nucleotides, at least 74 nucleotides, at least 75 nucleotides, at least 76 nucleotides, at least 77 nucleotides, at least 78 nucleotides, at least 79 nucleotides, at least 80 nucleotides, at least 81 nucleotides, at least 82 nucleotides, at least 83 nucleotides, at least 84 nucleotides, at least 85 nucleotides, at least 86 nucleotides, at least 87 nucleotides, at least 88 nucleotides, at least 89 nucleotides, at least 90 nucleotides, at least 91 nucleotides, at least 92 nucleotides, at least 93 nucleotides, at least 94 nucleotide at least 95 nucleotides, at least 96 nucleotides, at least 97 nucleotides, at least 98 nucleotides, at least 99 nucleotides, at least 100 nucleotides, at least 101 nucleotides, at least 102 nucleotides, at least 103 nucleotides, at least 104 nucleotides, at least 105 nucleotides, at least 106 nucleotides, at least 107 nucleotides, at least 108 nucleotides, at least 109 nucleotides, or at least 110 nucleotides, or more in length.
[1363] 227. The set of PEgRNAs of embodiment 224, wherein the replacement is at least 1 nucleotide, at least 2 nucleotides, at least 3 nucleotides, at least 4 nucleotides, at least 5 nucleotides, at least 6 nucleotides, at least 7 nucleotides, at least 8 nucleotides, at least 9 nucleotides, at least 10 nucleotides, at least 11 nucleotides, at least 12 nucleotides, at least 13 nucleotides, at least 14 nucleotides, at least 15 nucleotides, at least 16 nucleotides, at least 17 nucleotides, at least 18 nucleotides, at least 19 nucleotidesis at least 20 nucleotides, at least 21 nucleotides, at least 22 nucleotides, at least 23 nucleotides, at least 24 nucleotides, at least 25 nucleotides, at least 26 nucleotides, at least 27 nucleotides, at least 28 nucleotides, at least 29 nucleotides, at least 30 nucleotides, at least 31 nucleotides, at least 32 nucleotides, at least 33 nucleotides, at least 34 nucleotides, at least 35 nucleotides, at least 36 nucleotides, at least 37 nucleotides, at least 38 nucleotides, at least 39 nucleotides, at least 40 nucleotides, at least 41 nucleotides, at least 42 nucleotides, at least 43 nucleotides, at least 44 nucleotides, at least 45 nucleotides, at least 46 nucleotides, at least 47 nucleotides, at least 48 nucleotides, at least 49 nucleotides, at least 50 nucleotides, at least 51 nucleotides, at least 52 nucleotides, at least 53 nucleotides, at least 54 nucleotides, at least 55 nucleotides, at least 56 nucleotides, at least 57 nucleotides, at least 58 nucleotides, at least 59 nucleotides, at least 60 nucleotides, at least 61 nucleotides, at least 62 nucleotides, at least 63 nucleotides, at least 64 nucleotides, at least 65 nucleotides, at least 66 nucleotides, at least 67 nucleotides, at least 68 nucleotides, at least 69 nucleotides, at least 70 nucleotides, at least 71 nucleotides, at least 72 nucleotides, at least 73 nucleotides, at least 74 nucleotides, at least 75 nucleotides, at least 76 nucleotides, at least 77 nucleotides, at least 78 nucleotides, at least 79 nucleotides, at least 80 nucleotides, at least 81 nucleotides, at least 82 nucleotides, at least 83 nucleotides, at least 84 nucleotides, at least 85 nucleotides, at least 86 nucleotides, at least 87 nucleotides, at least 88 nucleotides, at least 89 nucleotides, at least 90 nucleotides, at least 91 nucleotides, at least 92 nucleotides, at least 93 nucleotides, at least 94 nucleotide at least 95 nucleotides, at least 96 nucleotides, at least 97 nucleotides, at least 98 nucleotides, at least 99 nucleotides, at least 100 nucleotides, at least 101 nucleotides, at least 102 nucleotides, at least 103 nucleotides, at least 104 nucleotides, at least 105 nucleotides, at least 106 nucleotides, at least 107 nucleotides, at least 108 nucleotides, at least 109 nucleotides, or at least 110 nucleotides, or more in length.
[1364] 228. A polynucleotide encoding a set of PEgRNAs of any of embodiments 221-227.
[1365] 229. A vector comprising the polynucleotide of embodiment 228 for expressing the plurality of PEgRNAs in a cell.
[1366] 230. A cell comprising the vector of embodiment 229.
[1367] 231. A pharmaceutical composition comprising the plurality of PEgRNAs of any one of embodiments 221-227, a vector of embodiment 229, or a cell of embodiment 230, and a pharmaceutical excipient.
[1368] 232. A method for modifying a genome in a cell, comprising:
   [1369] (i) contacting a genome with a dual-flap prime editing system, said system comprising a first prime editor/pegRNA complex capable of installing a first 3′ nucleic acid flap at a first nick site on a first strand of a target site and a second prime editor/pegRNA complex capable of installing a second 3′ nucleic acid flap at a second nick site on a second strand of a target site,
      [1370] wherein the first 3′ nucleic acid flap and the second 3′ nucleic acid flap are reverse complement sequences that form a duplex, and
      [1371] wherein the duplex comprises a first recombinase site, and
      [1372] wherein the cell installs the duplex comprising the first recombinase site at the target site in place of an endogenous duplex positioned between the first and second nick sites;
   [1373] (ii) contacting the first recombinase site with a donor nucleic acid comprising a second recombinase site; and
   [1374] (iii) contacting the genome with a recombinase capable recombination between the first and second recombinase sites, thereby integrating the donor nucleic acid at the target site in the genome.

### [9] Methods

### Methods for Multi-Flap Prime Editing

[1375] In one aspect, the present disclosure provides methods for simultaneously editing a first and a second complementary strands of a double-stranded DNA sequence at a target site, said method comprising contacting the double-stranded DNA sequence with a pair of prime editor complexes, said pair comprising:
[1376] a. a first prime editor complex, comprising:
   [1377] i. a first prime editor comprising a first nucleic acid programmable DNA binding protein (napDNAbp) and a first polypeptide comprising an RNA-dependent DNA polymerase activity; and
   [1378] ii. a first prime editing guide RNA (first PEgRNA) that binds to a first binding site on the first strand of the genomic DNA sequence upstream of the target site;
[1379] b. a second prime editor complex, comprising:
   [1380] i. a second prime editor comprising a second nucleic acid programmable DNA binding protein (second napDNAbp) and a second polypeptide comprising an RNA-dependent DNA polymerase activity; and
   [1381] ii. a second prime editing guide RNA (second PEgRNA) that binds to a second binding site on the second strand of the genomic DNA sequence downstream of the target site;

[1382] wherein the first prime editor complex causes a first nick at a sequence complementary to the first binding site and the subsequent polymerization of a first single-stranded DNA sequence having a 3′-end from the available 5′-end formed by the first nick;

[1383] wherein the second prime editor complex causes a second nick at a sequence complementary to the second binding site and the subsequent polymerization of a second single-stranded DNA sequence having a 3′-end from the available 5′-end formed by the second nick;

[1384] wherein the first single-stranded DNA sequence and the second single-stranded DNA sequence are reverse complements over at least a region of complementarity and form a duplex comprising an edit; and

[1385] wherein the the duplex replaces the nicked first and second complementary strands of the double-stranded DNA sequence.

[1386] In another aspect, the present disclosure provides methods for simultaneously editing first and second complementary strands of a double-stranded DNA sequence at a target site, the method comprising contacting the double-stranded DNA sequence with a pair of prime editor complexes, the pair comprising:
[1387] (a) a first prime editor complex, comprising:
   [1388] i. a first prime editor comprising a first nucleic acid programmable DNA binding protein (first napDNAbp) and a first polypeptide comprising an RNA-dependent DNA polymerase activity; and
   [1389] ii. a first prime editing guide RNA (first PEgRNA) that binds to a first target sequence on the first strand of the genomic DNA sequence upstream of the target site;
[1390] (b) a second prime editor complex, comprising:
   [1391] i. a second prime editor comprising a second nucleic acid programmable DNA binding protein (second napDNAbp) and a second polypeptide comprising an RNA-dependent DNA polymerase activity; and
   [1392] ii. a second prime editing guide RNA (second PEgRNA) that binds to a second target sequence on the second strand of the genomic DNA sequence upstream of the target site;
[1393] (c) a third prime editor complex, comprising:
   [1394] i. a third prime editor comprising a third nucleic acid programmable DNA binding protein (third napDNAbp) and a third polypeptide comprising an RNA-dependent DNA polymerase activity; and
   [1395] ii. a third prime editing guide RNA (third PEgRNA) that binds to a third target sequence on the first strand of the genomic DNA sequence downstream of the target site;
[1396] (d) a fourth prime editor complex, comprising:
   [1397] i. a fourth prime editor comprising a second nucleic acid programmable DNA binding protein (fourth napDNAbp) and a fourth polypeptide comprising an RNA-dependent DNA polymerase activity; and
   [1398] ii. a fourth prime editing guide RNA (fourth PEgRNA) that binds to a fourth target sequence on the second strand of the genomic DNA sequence downstream of the target site;

[1399] wherein the first prime editor complex causes a first nick at the first target sequence and the subsequent polymerization of a first single-stranded DNA sequence having a 3′-end from the available 5′-end formed by the first nick;

[1400] wherein the second prime editor complex causes a second nick at the second target sequence and the subsequent polymerization of a second single-stranded DNA sequence having a 3′-end from the available 5′-end formed by the second nick;

[1401] wherein the third prime editor complex causes a third nick at the third target sequence and the subsequent polymerization of a third single-stranded DNA sequence having a 3′-end from the available 5′-end formed by the third nick;

[1402] wherein the fourth prime editor complex causes a fourth nick at the fourth target sequence and the subsequent polymerization of a fourth single-stranded DNA sequence having a 3′-end from the available 5′-end formed by the fourth nick;

[1403] wherein the first single-stranded DNA sequence and the second single-stranded DNA sequence are reverse complements over at least a region of complementarity and form a duplex, wherein the duplex replaces the nicked first and second complementary strands of the double-stranded DNA sequence; and

[1404] wherein the third single-stranded DNA sequence and the fourth single-stranded DNA sequence are reverse complements over at least a region of complementarity and form a duplex, wherein the duplex replaces the nicked first and second complementary strands of the double-stranded DNA sequence.

[1405] This Specification describes multi-flap prime editing systems (including, for example, a dual-flap prime editing system and a quadruple-flap prime editing system) that address the challenges associated with flap equilibration and subsequent incorporation of the edit into the non-edited complementary genomic DNA strand by simultaneously editing both DNA strands. In the dual-flap prime editing system, two PEgRNAs are used to target opposite strands of a genomic site and direct the synthesis of two complementary 3′ flaps containing edited DNA sequence (FIG. 90). In the quadruple-flap prime editing system, four PEgRNAs are used and direct the synthesis of four 3′ flaps, two of which are complementary to one another and the other two of which are complementary to one another (FIG. 95, FIG. 96A, and FIG. 98A). Unlike classical prime editing, there is no requirement for the pair of edited DNA strands (3′ flaps) to directly compete with 5′ flaps in endogenous genomic DNA, as the complementary edited strand is available for hybridization instead. Since both strands of the duplex are synthesized as edited DNA, the multi-flap prime editing system obviates the need for the replacement of the non-edited complementary DNA strand required by classical prime editing. Instead, cellular DNA repair machinery need only excise the paired 5′ flaps (original genomic DNA) and ligate the paired 3′ flaps (edited DNA) into the locus. Therefore, there is also no need to include sequences homologous to genomic DNA in the newly synthesized DNA strands, allowing selective hybridization of the new strands and facilitating edits that contain minimal genomic homology. Nuclease-active versions of multi-flap prime editors that cut both strands of DNA could also be used to accelerate the removal of the original DNA sequence.

[1406] Like classical prime editing, multi-flap prime editing is a versatile and precise genome editing method that directly writes new genetic information into a specified DNA site using a nucleic acid programmable DNA binding protein (“napDNAbp”) working in association with a polymerase (i.e., in the form of a fusion protein or otherwise provided in trans with the napDNAbp), wherein the prime editing system is programmed with a prime editing (PE) guide RNA (“PEgRNA”) that both specifies the target site and templates the synthesis of the desired edit in the form of a replacement DNA strand by way of an extension (either DNA or RNA) engineered onto a guide RNA (e.g., at the 5′ or 3′ end, or at an internal portion of a guide RNA). The replacement strand containing the desired edit (e.g., a single nucleobase substitution) shares the same sequence as the endogenous strand of the target site to be edited (with the exception that it includes the desired edit). Through DNA repair and/or replication machinery, the endogenous strand of the target site is replaced by the newly synthesized replacement strand containing the desired edit. In some cases, prime editing may be thought of as a “search-and-replace” genome editing technology since the dual prime editors, as described herein, not only search and locate the desired target site to be edited, but at the same time, encode a replacement strand containing a desired edit which is installed in place of the corresponding target site endogenous DNA strand.

[1407] In dual-flap prime editing, a double-stranded DNA sequence is contacted at a target site with a first and a second prime editor complex. Each complex comprises a fusion protein and a PEgRNA. In some embodiments, each fusion protein comprises a nucleic acid programmable DNA binding protein (napDNAbp) and a polypeptide having an RNA-dependent DNA polymerase activity (e.g., a reverse transcriptase), and each PEgRNA comprises a spacer sequence, a gRNA core, a DNA synthesis template, and a primer binding site. Each DNA synthesis template can encode a single-stranded DNA sequence, which may comprise an edited portion of one or more nucleotides. The two single-stranded DNA sequences encoded may be complementary to one another and form a duplex, which can integrate into the target site to be edited. The various elements of the prime editor complexes (e.g., fusion proteins, napDNAbp, polymerase, PEgRNAs, etc.) may comprise any of the embodiments of the systems disclosed herein.

[1408] In quadruple-flap prime editing, a double-stranded DNA sequence is contacted at a target site with a first, a second, a third, and a fourth prime editor complex. Each complex comprises a fusion protein and a PEgRNA. In some embodiments, each fusion protein comprises a nucleic acid programmable DNA binding protein (napDNAbp) and a polypeptide having an RNA-dependent DNA polymerase activity (e.g., a reverse transcriptase), and each PEgRNA comprises a spacer sequence, a gRNA core, a DNA synthesis template, and a primer binding site. Each DNA synthesis template encodes a single-stranded DNA sequence. The two single-stranded DNA sequences encoded may be complementary to one another and form a duplex, which can integrate into the target site to be edited. The various elements of the prime editor complexes (e.g., fusion proteins, napDNAbp, polymerase, PEgRNAs, etc.) may comprise any of the embodiments of the systems disclosed herein.

[1409] The methods for multi-flap prime editing provided herein can be used for numerous applications. For example, they can be used to facilitate the inversion of a target DNA sequence. In this application, a first single-stranded DNA sequence encoded by the DNA synthesis template of the first PEgRNA and a second single-stranded DNA sequence encoded by the DNA synthesis template of the second PEgRNA are on opposite ends of a target DNA sequence, and a third single-stranded DNA sequence encoded by the DNA synthesis template of the third PEgRNA and a fourth single-stranded DNA sequence encoded by the DNA synthesis template of a fourth PEgRNA are on opposite ends of the same target DNA sequence.

[1410] In some embodiments, the methods for multi-flap prime editing provided herein further comprise providing a circular DNA donor, part of which can be integrated into a double-stranded nucleic acid at a target site. In this application, a first single-stranded DNA sequence encoded by the DNA synthesis template of the first PEgRNA and a third single-stranded DNA sequence encoded by the DNA synthesis template of the third PEgRNA are on opposite ends of the target DNA sequence, and a second single-stranded DNA sequence encoded by the DNA synthesis template of the second PEgRNA and a fourth single-stranded DNA sequence encoded by the DNA synthesis template of the fourth PEgRNA are on the circular DNA donor. The portion of the circular DNA donor between the second single-stranded DNA sequence and the fourth single-stranded DNA sequence can form a duplex, which replaces the target DNA sequence between the first single-stranded DNA sequence and the third single-stranded DNA sequence.

[1411] In another application, the methods for multi-flap prime editing provided herein allow for translocation of a target DNA sequence from a first nucleic acid molecule (e.g., a first chromosome) to a second nucleic acid molecule (e.g., a second chromosome). In this application, a first single-stranded DNA sequence encoded by the DNA synthesis template of the first PEgRNA and a third single-stranded DNA sequence encoded by the DNA synthesis template of the third PEgRNA are on a first nucleic acid molecule, and a second single-stranded DNA sequence encoded by the DNA synthesis template of the second PEgRNA and a fourth single-stranded DNA sequence encoded by the DNA synthesis template of the fourth PEgRNA are on a second nucleic acid molecule. The portion of the first nucleic acid molecule between the first single-stranded DNA sequence and the third single-stranded DNA sequence can be incorporated into the second nucleic acid molecule, and the portion of the second nucleic acid molecule between the second single-stranded DNA sequence and the fourth single-stranded DNA sequence is incorporated into the first nucleic acid molecule.

### Other Methods

[1412] The instant disclosure provides methods for the treatment of a subject diagnosed with a disease associated with or caused by a point mutation, or other mutations (e.g., deletion, insertion, inversion, duplication, etc.) that can be corrected by the multi-flap prime editing system provided herein, as exemplified, but not limited to prion disease (e.g., Example 5 herein), trinucleotide repeat expansion disease (e.g., Example 3 herein), or CDKL5 Deficiency Disorder (CDD) (e.g., Example 23 herein).

[1413] Virtually any disease-causing genetic defect may be repaired by using multi-flap prime editing, which includes the selection of an appropriate prime editor fusion protein (including a napDNAbp and a polymerase (e.g., a reverse transcriptase), and designing of an appropriate PEgRNA designed to (a) target the appropriate target DNA containing an edit site, and (b) provide a template for the synthesis of a single strand of DNA from the 3′ end of the nick site that includes the desired edit which displaces and replaces the endogenous strand immediately downstream of the nick site. Multi-flap prime editing can be used, without limitation, to (a) install mutation-correcting changes to a nucleotide sequence, (b) install protein and RNA tags, (c) install immunoepitopes on proteins of interest, (d) install inducible dimerization domains in proteins, (e) install or remove sequences to alter that activity of a biomolecule, (f) install recombinase target sites to direct specific genetic changes, and (g) mutagenesis of a target sequence by using an error-prone RT.

[1414] The method of treating a disorder can involve as an early step the design of an appropriate PEgRNA and prime editor fusion protein in accordance with the methods described herein, which include a number of considerations that may be taken into account, such as:
[1415] (a) the target sequence, i.e., the nucleotide sequence in which one or more nucleobase modifications are desired to be installed by the prime editor;
[1416] (b) the location of the cut site within the target sequence, i.e., the specific nucleobase position at which the prime editor will induce a single-stand nick to create a 3′ end RT primer sequence on one side of the nick and the 5′ end endogenous flap on the other side of the nick (which ultimately is removed by FEN1 or equivalent thereto and replaced by the 3′ ssDNA flap. The cut site creates the 3′ end primer sequence which becomes extended by the polymerase of the PE fusion protein (e.g., a RT enzyme) during RNA-dependent DNA polymerization to create the 3′ ssDNA flap containing the desired edit, which then replaces the 5′ endogenous DNA flap in the target sequence.
[1417] (c) the available PAM sequences (including the canonical SpCas9 PAM sites, as well as non-canonical PAM sites recognized by Cas9 variants and equivalents with expanded or differing PAM specificities);
[1418] (d) the spacing between the available PAM sequences and the location of the cut site in the PAM strand;
[1419] (e) the particular Cas9, Cas9 variant, or Cas9 equivalent of the prime editor available to be used (which in part is dictated by the available PAM);
[1420] (f) the sequence and length of the primer binding site;
[1421] (g) the sequence and length of the edit template;
[1422] (h) the sequence and length of the homology arm;
[1423] (i) the spacer sequence and length; and
[1424] (j) the gRNA core sequence.

[1425] A suitable PEgRNA, and optionally a nicking-sgRNA design guide for second-site nicking, can be designed by way of the following exemplarly step-by-step set of instructions which takes into account one or more of the above considerations. The steps reference the examples shown in FIGS. 70A-70I.
[1426] 1. Define the target sequence and the edit. Retrieve the sequence of the target DNA region (˜200bp) centered around the location of the desired edit (point mutation, insertion, deletion, or combination thereof). See FIG. 70A.
[1427] 2. Locate target PAMs. Identify PAMs in the proximity to the desired edit location. PAMs can be identified on either strand of DNA proximal to the desired edit location. While PAMs close to the edit position are preferred (i.e., wherein the nick site is less than 30 nt from the edit position, or less than 29 nt, 28 nt, 27 nt, 26 nt, 25 nt, 24 nt, 23 nt, 22 nt, 21 nt, 20 nt, 19 nt, 18 nt, 17 nt, 16 nt, 15 nt, 14 nt, 13 nt, 12 nt, 11 nt, 10 nt, 9 nt, 8 nt, 7 nt, 6 nt, 5 nt, 4 nt, 3 nt, or 2 nt from the edit position to the nick site), it is possible to install edits using protospacers and PAMs that place the nick≥30 nt from the edit position. See FIG. 70B.
[1428] 3. Locate the nick sites. For each PAM being considered, identify the corresponding nick site and on which strand. For Sp Cas9 H840A nickase, cleavage occurs in the PAM-containing strand between the 3′ and 4^{th} bases 5′ to the NGG PAM. All edited nucleotides must exist 3′ of the nick site, so appropriate PAMs must place the nick 5′ to the target edit on the PAM-containing strand. In the example shown below, there are two possible PAMs. For simplicity, the remaining steps will demonstrate the design of a PEgRNA using PAM 1 only. See FIG. 70C.
[1429] 4. Design the spacer sequence. The protospacer of SpCas9 corresponds to the 20 nucleotides 5′ to the NGG PAM on the PAM-containing strand. Efficient Pol III transcription initiation requires a G to be the first transcribed nucleotide. If the first nucleotide of the protospacer is a G, the spacer sequence for the PEgRNA is simply the protospacer sequence. If the first nucleotide of the protospacer is not a G, the spacer sequence of the PEgRNA is G followed by the protospacer sequence. See FIG. 70D.
[1430] 5. Design a primer binding site (PBS). Using the starting allele sequence, identify the DNA primer on the PAM-containing strand. The 3′ end of the DNA primer is the nucleotide just upstream of the nick site (i.e. the 4^{th} base 5′ to the NGG PAM for Sp Cas9). As a general design principle for use with PE2 and PE3, a PEgRNA primer binding site (PBS) containing 12 to 13 nucleotides of complementarity to the DNA primer can be used for sequences that contain —40-60% GC content. For sequences with low GC content, longer (14- to 15-nt) PBSs should be tested. For sequences with higher GC content, shorter (8- to 11-nt) PB Ss should be tested. Optimal PBS sequences should be determined empirically, regardless of GC content. To design a length-p PBS sequence, take the reverse complement of the first p nucleotides 5′ of the nick site in the PAM-containing strand using the starting allele sequence. See FIG. 70E.
[1431] 6. Design an RT template (or DNA synthesis template). The RT template (or DNA synthesis template where the polymerase is not reverse transcriptase) encodes the designed edit and homology to the sequence adjacent to the edit. In one embodiment, these regions correspond to the DNA synthesis template of FIG. 3D and FIG. 3E, wherein the DNA synthesis template comprises the “edit template” and the “homology arm.” Optimal RT template lengths vary based on the target site. For short-range edits (positions +1 to +6), it is recommended to test a short (9 to 12 nt), a medium (13 to 16 nt), and a long (17 to 20 nt) RT template. For long-range edits (positions +7 and beyond), it is recommended to use RT templates that extend at least 5 nt (preferably 10 or more nt) past the position of the edit to allow for sufficient 3′ DNA flap homology. For long-range edits, several RT templates should be screened to identify functional designs. For larger insertions and deletions (≥5 nt), incorporation of greater 3′ homology (˜20 nt or more) into the RT template is recommended. Editing efficiency is typically impaired when the RT template encodes the synthesis of a G as the last nucleotide in the reverse transcribed DNA product (corresponding to a C in the RT template of the PEgRNA). As many RT templates support efficient prime editing, avoidance of G as the final synthesized nucleotide is recommended when designing RT templates. To design a length-r RT template sequence, use the desired allele sequence and take the reverse complement of the first r nucleotides 3′ of the nick site in the strand that originally contained the PAM. Note that compared to SNP edits, insertion or deletion edits using RT templates of the same length will not contain identical homology. See FIG. 70F.
[1432] 7. Assemble the full PEgRNA sequence. Concatenate the PEgRNA components in the following order (5′ to 3′): spacer, scaffold, RT template and PBS. See FIG. 70G.
[1433] 8. Designing nicking-sgRNAs for PE3. Identify PAMs on the non-edited strand upstream and downstream of the edit. Optimal nicking positions are highly locus-dependent and should be determined empirically. In general, nicks placed 40 to 90 nucleotides 5′ to the position across from the PEgRNA-induced nick lead to higher editing yields and fewer indels. A nicking sgRNA has a spacer sequence that matches the 20-nt protospacer in the starting allele, with the addition of a 5′-G if the protospacer does not begin with a G. See FIG. 70H.
[1434] 9. Designing PE3b nicking-sgRNAs. If a PAM exists in the complementary strand and its corresponding protospacer overlaps with the sequence targeted for editing, this edit could be a candidate for the PE3b system. In the PE3b system, the spacer sequence of the nicking-sgRNA matches the sequence of the desired edited allele, but not the starting allele. The PE3b system operates efficiently when the edited nucleotide(s) falls within the seed region (˜10 nt adjacent to the PAM) of the nicking-sgRNA protospacer. This prevents nicking of the complementary strand until after installation of the edited strand, preventing competition between the PEgRNA and the sgRNA for binding the target DNA. PE3b also avoids the generation of simultaneous nicks on both strands, thus reducing indel formation significantly while maintaining high editing efficiency. PE3b sgRNAs should have a spacer sequence that matches the 20-nt protospacer in the desired allele, with the addition of a 5′ G if needed. See FIG. 70I.

[1435] The above step-by-step process for designing a suitable PEgRNA and a second-site nicking sgRNA is not meant to be limiting in any way. The disclosure contemplates variations of the above-described step-by-step process which would be derivable therefrom by a person of ordinary skill in the art.

[1436] Once a suitable PEgRNA and PE fusion protein are selected/designed, they may be administered by a suitable methodology, such as by vector-based transfection (in which one or more vectors comprising DNA encoding the PEgRNA and the PE fusion protein and which are expressed within a cell upon trransfection with the vectors), direct delivery of the PE fusion protein complexed with the PEgRNA (e.g., RNP delivery) in a delivery format (e.g., lipid particles, nanoparticles), or by a mRNA-based delivery system. Such methods are described herein in the present disclosure and any know method may be utilized.

[1437] The PEgRNA and PE fusion protein (or together, referred to as the PE complex) can be delivered to a cell in a therapeutically effective amount such that upon contacting the target DNA of interest, the desired edit becomes installed therein.

[1438] Any disease is conceivably treatable by such methods so long as delivery to the appropriate cells is feasible. The person having ordinary skill in the art will be able to choose and/or select a PE delivery methodology to suit the intended purpose and the intended target cells.

[1439] For example, in some embodiments, a method is provided that comprises administering to a subject having such a disease, e.g., a cancer associated with a point mutation as described above, an effective amount of the multi-flap prime editing system described herein that corrects the point mutation or introduces a deactivating mutation into a disease-associated gene as mediated by homology-directed repair in the presence of a donor DNA molecule comprising desired genetic change. In some embodiments, a method is provided that comprises administering to a subject having such a disease, e.g., a cancer associated with a point mutation as described above, an effective amount of the multi-flap prime editing system described herein that corrects the point mutation or introduces a deactivating mutation into a disease-associated gene. In some embodiments, the disease is a proliferative disease. In some embodiments, the disease is a genetic disease. In some embodiments, the disease is a neoplastic disease. In some embodiments, the disease is a metabolic disease. In some embodiments, the disease is a lysosomal storage disease. Other diseases that can be treated by correcting a point mutation or introducing a deactivating mutation into a disease-associated gene will be known to those of skill in the art, and the disclosure is not limited in this respect.

[1440] The instant disclosure provides methods for the treatment of additional diseases or disorders, e.g., diseases or disorders that are associated or caused by a point mutation that can be corrected by TPRT-mediated gene editing. Some such diseases are described herein, and additional suitable diseases that can be treated with the strategies and fusion proteins provided herein will be apparent to those of skill in the art based on the instant disclosure. Exemplary suitable diseases and disorders are listed below. It will be understood that the numbering of the specific positions or residues in the respective sequences depends on the particular protein and numbering scheme used. Numbering might be different, e.g., in precursors of a mature protein and the mature protein itself, and differences in sequences from species to species may affect numbering. One of skill in the art will be able to identify the respective residue in any homologous protein and in the respective encoding nucleic acid by methods well known in the art, e.g., by sequence alignment and determination of homologous residues. Exemplary suitable diseases and disorders include, without limitation: 2-methyl-3-hydroxybutyric aciduria; 3 beta-Hydroxysteroid dehydrogenase deficiency; 3-Methylglutaconic aciduria; 3-Oxo-5 alpha-steroid delta 4-dehydrogenase deficiency; 46,XY sex reversal, type 1, 3, and 5; 5-Oxoprolinase deficiency; 6-pyruvoyl-tetrahydropterin synthase deficiency; Aarskog syndrome; Aase syndrome; Achondrogenesis type 2; Achromatopsia 2 and 7; Acquired long QT syndrome; Acrocallosal syndrome, Schinzel type; Acrocapitofemoral dysplasia; Acrodysostosis 2, with or without hormone resistance; Acroerythrokeratoderma; Acromicric dysplasia; Acth-independent macronodular adrenal hyperplasia 2; Activated PI3K-delta syndrome; Acute intermittent porphyria; deficiency of Acyl-CoA dehydrogenase family, member 9; Adams-Oliver syndrome 5 and 6; Adenine phosphoribosyltransferase deficiency; Adenylate kinase deficiency; hemolytic anemia due to Adenylosuccinate lyase deficiency; Adolescent nephronophthisis; Renal-hepatic-pancreatic dysplasia; Meckel syndrome type 7; Adrenoleukodystrophy; Adult junctional epidermolysis bullosa; Epidermolysis bullosa, junctional, localisata variant; Adult neuronal ceroid lipofuscinosis; Adult neuronal ceroid lipofuscinosis; Adult onset ataxia with oculomotor apraxia; ADULT syndrome; Afibrinogenemia and congenital Afibrinogenemia; autosomal recessive Agammaglobulinemia 2; Age-related macular degeneration 3, 6, 11, and 12; Aicardi Goutieres syndromes 1, 4, and 5; Chilbain lupus 1; Alagille syndromes 1 and 2; Alexander disease; Alkaptonuria; Allan-Herndon-Dudley syndrome; Alopecia universalis congenital; Alpers encephalopathy; Alpha-1-antitrypsin deficiency; autosomal dominant, autosomal recessive, and X-linked recessive Alport syndromes; Alzheimer disease, familial, 3, with spastic paraparesis and apraxia; Alzheimer disease, types, 1, 3, and 4; hypocalcification type and hypomaturation type, IIA1 Amelogenesis imperfecta; Aminoacylase 1 deficiency; Amish infantile epilepsy syndrome; Amyloidogenic transthyretin amyloidosis; Amyloid Cardiomyopathy, Transthyretin-related; Cardiomyopathy; Amyotrophic lateral sclerosis types 1, 6, 15 (with or without frontotemporal dementia), 22 (with or without frontotemporal dementia), and 10; Frontotemporal dementia with TDP43 inclusions, TARDBP-related; Andermann syndrome; Andersen Tawil syndrome; Congenital long QT syndrome; Anemia, nonspherocytic hemolytic, due to G6PD deficiency; Angelman syndrome; Severe neonatal-onset encephalopathy with microcephaly; susceptibility to Autism, X-linked 3; Angiopathy, hereditary, with nephropathy, aneurysms, and muscle cramps; Angiotensin i-converting enzyme, benign serum increase; Aniridia, cerebellar ataxia, and mental retardation; Anonychia; Antithrombin III deficiency; Antley-Bixler syndrome with genital anomalies and disordered steroidogenesis; Aortic aneurysm, familial thoracic 4, 6, and 9; Thoracic aortic aneurysms and aortic dissections; Multisystemic smooth muscle dysfunction syndrome; Moyamoya disease 5; Aplastic anemia; Apparent mineralocorticoid excess; Arginase deficiency; Argininosuccinate lyase deficiency; Aromatase deficiency; Arrhythmogenic right ventricular cardiomyopathy types 5, 8, and 10; Primary familial hypertrophic cardiomyopathy; Arthrogryposis multiplex congenita, distal, X-linked; Arthrogryposis renal dysfunction cholestasis syndrome; Arthrogryposis, renal dysfunction, and cholestasis 2; Asparagine synthetase deficiency; Abnormality of neuronal migration; Ataxia with vitamin E deficiency; Ataxia, sensory, autosomal dominant; Ataxia-telangiectasia syndrome; Hereditary cancer-predisposing syndrome; Atransferrinemia; Atrial fibrillation, familial, 11, 12, 13, and 16; Atrial septal defects 2, 4, and 7 (with or without atrioventricular conduction defects); Atrial standstill 2; Atrioventricular septal defect 4; Atrophia bulborum hereditaria; ATR-X syndrome; Auriculocondylar syndrome 2; Autoimmune disease, multisystem, infantile-onset; Autoimmune lymphoproliferative syndrome, type 1 a; Autosomal dominant hypohidrotic ectodermal dysplasia; Autosomal dominant progressive external ophthalmoplegia with mitochondrial DNA deletions 1 and 3; Autosomal dominant torsion dystonia 4; Autosomal recessive centronuclear myopathy; Autosomal recessive congenital ichthyosis 1, 2, 3, 4A, and 4B; Autosomal recessive cutis laxa type IA and 1B; Autosomal recessive hypohidrotic ectodermal dysplasia syndrome; Ectodermal dysplasia 11b; hypohidrotic/hair/tooth type, autosomal recessive; Autosomal recessive hypophosphatemic bone disease; Axenfeld-Rieger syndrome type 3; Bainbridge-Ropers syndrome; Bannayan-Riley-Ruvalcaba syndrome; PTEN hamartoma tumor syndrome; Baraitser-Winter syndromes 1 and 2; Barakat syndrome; Bardet-Biedl syndromes 1, 11, 16, and 19; Bare lymphocyte syndrome type 2, complementation group E; Bartter syndrome antenatal type 2; Bartter syndrome types 3, 3 with hypocalciuria , and 4; Basal ganglia calcification, idiopathic, 4; Beaded hair; Benign familial hematuria; Benign familial neonatal seizures 1 and 2; Seizures, benign familial neonatal, 1, and/or myokymia; Seizures, Early infantile epileptic encephalopathy 7; Benign familial neonatal-infantile seizures; Benign hereditary chorea; Benign scapuloperoneal muscular dystrophy with cardiomyopathy; Bernard-Soulier syndrome, types A1 and A2 (autosomal dominant); Bestrophinopathy, autosomal recessive; beta Thalassemia; Bethlem myopathy and Bethlem myopathy 2; Bietti crystalline corneoretinal dystrophy; Bile acid synthesis defect, congenital, 2; Biotinidase deficiency; Birk Bard mental retardation dysmorphism syndrome; Blepharophimosis, ptosis, and epicanthus inversus; Bloom syndrome; Borjeson-Forssman-Lehmann syndrome; Boucher Neuhauser syndrome; Brachydactyly types A1 and A2; Brachydactyly with hypertension; Brain small vessel disease with hemorrhage; Branched-chain ketoacid dehydrogenase kinase deficiency; Branchiootic syndromes 2 and 3; Breast cancer, early-onset; Breast-ovarian cancer, familial 1, 2, and 4; Brittle cornea syndrome 2; Brody myopathy; Bronchiectasis with or without elevated sweat chloride 3; Brown-Vialetto-Van laere syndrome and Brown-Vialetto-Van Laere syndrome 2; Brugada syndrome; Brugada syndrome 1; Ventricular fibrillation; Paroxysmal familial ventricular fibrillation; Brugada syndrome and Brugada syndrome 4; Long QT syndrome; Sudden cardiac death; Bull eye macular dystrophy; Stargardt disease 4; Cone-rod dystrophy 12; Bullous ichthyosiform erythroderma; Burn-Mckeown syndrome; Candidiasis, familial, 2, 5, 6, and 8; Carbohydrate-deficient glycoprotein syndrome type I and II; Carbonic anhydrase VA deficiency, hyperammonemia due to; Carcinoma of colon; Cardiac arrhythmia; Long QT syndrome, LQT1 subtype; Cardioencephalomyopathy, fatal infantile, due to cytochrome c oxidase deficiency; Cardiofaciocutaneous syndrome; Cardiomyopathy; Danon disease; Hypertrophic cardiomyopathy; Left ventricular noncompaction cardiomyopathy; Carnevale syndrome; Carney complex, type 1; Carnitine acylcarnitine translocase deficiency; Carnitine palmitoyltransferase I , II, II (late onset), and II (infantile) deficiency; Cataract 1, 4, autosomal dominant, autosomal dominant, multiple types, with microcornea, coppock-like, juvenile, with microcornea and glucosuria, and nuclear diffuse nonprogressive; Catecholaminergic polymorphic ventricular tachycardia; Caudal regression syndrome; Cd8 deficiency, familial; Central core disease; Centromeric instability of chromosomes 1,9 and 16 and immunodeficiency; Cerebellar ataxia infantile with progressive external ophthalmoplegi and Cerebellar ataxia, mental retardation, and dysequilibrium syndrome 2; Cerebral amyloid angiopathy, APP-related; Cerebral autosomal dominant and recessive arteriopathy with subcortical infarcts and leukoencephalopathy; Cerebral cavernous malformations 2; Cerebrooculofacioskeletal syndrome 2; Cerebro-oculo-facio-skeletal syndrome; Cerebroretinal microangiopathy with calcifications and cysts; Ceroid lipofuscinosis neuronal 2, 6, 7, and 10; Ch\xc3\xa9diak-Higashi syndrome, Chediak-Higashi syndrome, adult type; Charcot-Marie-Tooth disease types 1B, 2B2, 2C, 2F, 21, 2U (axonal), 1C (demyelinating), dominant intermediate C, recessive intermediate A, 2A2, 4C, 4D, 4H, IF, IVF, and X; Scapuloperoneal spinal muscular atrophy; Distal spinal muscular atrophy, congenital nonprogressive; Spinal muscular atrophy, distal, autosomal recessive, 5; CHARGE association; Childhood hypophosphatasia; Adult hypophosphatasia; Cholecystitis; Progressive familial intrahepatic cholestasis 3; Cholestasis, intrahepatic, of pregnancy 3; Cholestanol storage disease; Cholesterol monooxygenase (side-chain cleaving) deficiency; Chondrodysplasia Blomstrand type; Chondrodysplasia punctata 1, X-linked recessive and 2 X-linked dominant; CHOPS syndrome; Chronic granulomatous disease, autosomal recessive cytochrome b-positive, types 1 and 2; Chudley-McCullough syndrome; Ciliary dyskinesia, primary, 7, 11, 15, 20 and 22; Citrullinemia type I; Citrullinemia type I and II; Cleidocranial dysostosis; C-like syndrome; Cockayne syndrome type A, ; Coenzyme Q10 deficiency, primary 1, 4, and 7; Coffin Siris/Intellectual Disability; Coffin-Lowry syndrome; Cohen syndrome; Cold-induced sweating syndrome 1; COLE-CARPENTER SYNDROME 2; Combined cellular and humoral immune defects with granulomas; Combined d-2- and 1-2-hydroxyglutaric aciduria; Combined malonic and methylmalonic aciduria; Combined oxidative phosphorylation deficiencies 1, 3, 4, 12, 15, and 25; Combined partial and complete 17-alpha-hydroxylase/17,20-lyase deficiency; Common variable immunodeficiency 9; Complement component 4, partial deficiency of, due to dysfunctional cl inhibitor; Complement factor B deficiency; Cone monochromatism; Cone-rod dystrophy 2 and 6; Cone-rod dystrophy amelogenesis imperfecta; Congenital adrenal hyperplasia and Congenital adrenal hypoplasia, X-linked; Congenital amegakaryocytic thrombocytopenia; Congenital aniridia; Congenital central hypoventilation; Hirschsprung disease 3; Congenital contractural arachnodactyly; Congenital contractures of the limbs and face, hypotonia, and developmental delay; Congenital disorder of glycosylation types 1B, 1D, 1G, 1H, 1J, 1K, 1N, 1P, 2C, 2J, 2K, IIm; Congenital dyserythropoietic anemia, type I and II; Congenital ectodermal dysplasia of face; Congenital erythropoietic porphyria; Congenital generalized lipodystrophy type 2; Congenital heart disease, multiple types, 2; Congenital heart disease; Interrupted aortic arch; Congenital lipomatous overgrowth, vascular malformations, and epidermal nevi; Non-small cell lung cancer; Neoplasm of ovary; Cardiac conduction defect, nonspecific; Congenital microvillous atrophy; Congenital muscular dystrophy; Congenital muscular dystrophy due to partial LAMA2 deficiency; Congenital muscular dystrophy-dystroglycanopathy with brain and eye anomalies, types A2, A7, A8, A11, and A14; Congenital muscular dystrophy-dystroglycanopathy with mental retardation, types B2, B3, B5, and B15; Congenital muscular dystrophy-dystroglycanopathy without mental retardation, type B5; Congenital muscular hypertrophy-cerebral syndrome; Congenital myasthenic syndrome, acetazolamide-responsive; Congenital myopathy with fiber type disproportion; Congenital ocular coloboma; Congenital stationary night blindness, type 1A, 1B, 1C, 1E, 1F, and 2A; Coproporphyria; Cornea plana 2; Corneal dystrophy, Fuchs endothelial, 4; Corneal endothelial dystrophy type 2; Corneal fragility keratoglobus, blue sclerae and joint hypermobility; Cornelia de Lange syndromes 1 and 5; Coronary artery disease, autosomal dominant 2; Coronary heart disease; Hyperalphalipoproteinemia 2; Cortical dysplasia, complex, with other brain malformations 5 and 6; Cortical malformations, occipital; Corticosteroid-binding globulin deficiency; Corticosterone methyloxidase type 2 deficiency; Costello syndrome; Cowden syndrome 1; Coxa plana; Craniodiaphyseal dysplasia, autosomal dominant; Craniosynostosis 1 and 4; Craniosynostosis and dental anomalies; Creatine deficiency, X-linked; Crouzon syndrome; Cryptophthalmos syndrome; Cryptorchidism, unilateral or bilateral; Cushing symphalangism; Cutaneous malignant melanoma 1; Cutis laxa with osteodystrophy and with severe pulmonary, gastrointestinal, and urinary abnormalities; Cyanosis, transient neonatal and atypical nephropathic; Cystic fibrosis; Cystinuria; Cytochrome c oxidase i deficiency; Cytochrome-c oxidase deficiency; D-2-hydroxyglutaric aciduria 2; Darier disease, segmental; Deafness with labyrinthine aplasia microtia and microdontia (LAMM); Deafness, autosomal dominant 3a, 4, 12, 13, 15, autosomal dominant nonsyndromic sensorineural 17, 20, and 65; Deafness, autosomal recessive 1A, 2, 3, 6, 8, 9, 12, 15, 16, 18b, 22, 28, 31, 44, 49, 63, 77, 86, and 89; Deafness, cochlear, with myopia and intellectual impairment, without vestibular involvement, autosomal dominant, X-linked 2; Deficiency of 2-methylbutyryl-CoA dehydrogenase; Deficiency of 3-hydroxyacyl-CoA dehydrogenase; Deficiency of alpha-mannosidase; Deficiency of aromatic-L-amino-acid decarboxylase; Deficiency of bisphosphoglycerate mutase; Deficiency of butyryl-CoA dehydrogenase; Deficiency of ferroxidase; Deficiency of galactokinase; Deficiency of guanidinoacetate methyltransferase; Deficiency of hyaluronoglucosaminidase; Deficiency of ribose-5-phosphate isomerase; Deficiency of steroid 11-beta-monooxygenase; Deficiency of UDPglucose-hexose-1-phosphate uridylyltransferase; Deficiency of xanthine oxidase; Dejerine-Sottas disease; Charcot-Marie-Tooth disease, types ID and IVF; Dejerine-Sottas syndrome, autosomal dominant; Dendritic cell, monocyte, B lymphocyte, and natural killer lymphocyte deficiency; Desbuquois dysplasia 2; Desbuquois syndrome; DFNA 2 Nonsyndromic Hearing Loss; Diabetes mellitus and insipidus with optic atrophy and deafness; Diabetes mellitus, type 2, and insulin-dependent, 20; Diamond-Blackfan anemia 1, 5, 8, and 10; Diarrhea 3 (secretory sodium, congenital, syndromic) and 5 (with tufting enteropathy, congenital); Dicarboxylic aminoaciduria; Diffuse palmoplantar keratoderma, Bothnian type; Digitorenocerebral syndrome; Dihydropteridine reductase deficiency; Dilated cardiomyopathy 1A, 1AA, 1C, 1G, 1BB, 1DD, 1FF, 1HH, 1I, 1KK, 1N, 1S, 1Y, and 3B; Left ventricular noncompaction 3; Disordered steroidogenesis due to cytochrome p450 oxidoreductase deficiency; Distal arthrogryposis type 2B; Distal hereditary motor neuronopathy type 2B; Distal myopathy Markesbery-Griggs type; Distal spinal muscular atrophy, X-linked 3; Distichiasis-lymphedema syndrome; Dominant dystrophic epidermolysis bullosa with absence of skin; Dominant hereditary optic atrophy; Donnai Barrow syndrome; Dopamine beta hydroxylase deficiency; Dopamine receptor d2, reduced brain density of; Dowling-degos disease 4; Doyne honeycomb retinal dystrophy; Malattia leventinese; Duane syndrome type 2; Dubin-Johnson syndrome; Duchenne muscular dystrophy; Becker muscular dystrophy; Dysfibrinogenemia; Dyskeratosis congenita autosomal dominant and autosomal dominant, 3; Dyskeratosis congenita, autosomal recessive, 1, 3, 4, and 5; Dyskeratosis congenita X-linked; Dyskinesia, familial, with facial myokymia; Dysplasminogenemia; Dystonia 2 (torsion, autosomal recessive), 3 (torsion, X-linked), 5 (Dopa-responsive type), 10, 12, 16, 25, 26 (Myoclonic); Seizures, benign familial infantile, 2; Early infantile epileptic encephalopathy 2, 4, 7, 9, 10, 11, 13, and 14; Atypical Rett syndrome; Early T cell progenitor acute lymphoblastic leukemia; Ectodermal dysplasia skin fragility syndrome; Ectodermal dysplasia-syndactyly syndrome 1; Ectopia lentis, isolated autosomal recessive and dominant; Ectrodactyly, ectodermal dysplasia, and cleft lip/palate syndrome 3; Ehlers-Danlos syndrome type 7 (autosomal recessive), classic type, type 2 (progeroid), hydroxylysine-deficient, type 4, type 4 variant, and due to tenascin-X deficiency; Eichsfeld type congenital muscular dystrophy; Endocrine-cerebroosteodysplasia; Enhanced s-cone syndrome; Enlarged vestibular aqueduct syndrome; Enterokinase deficiency; Epidermodysplasia verruciformis; Epidermolysa bullosa simplex and limb girdle muscular dystrophy, simplex with mottled pigmentation, simplex with pyloric atresia, simplex, autosomal recessive, and with pyloric atresia; Epidermolytic palmoplantar keratoderma; Familial febrile seizures 8; Epilepsy, childhood absence 2, 12 (idiopathic generalized, susceptibility to) 5 (nocturnal frontal lobe), nocturnal frontal lobe type 1, partial, with variable foci, progressive myoclonic 3, and X-linked, with variable learning disabilities and behavior disorders; Epileptic encephalopathy, childhood-onset, early infantile, 1, 19, 23, 25, 30, and 32; Epiphyseal dysplasia, multiple, with myopia and conductive deafness; Episodic ataxia type 2; Episodic pain syndrome, familial, 3; Epstein syndrome; Fechtner syndrome; Erythropoietic protoporphyria; Estrogen resistance; Exudative vitreoretinopathy 6; Fabry disease and Fabry disease, cardiac variant; Factor H, VII, X, v and factor viii, combined deficiency of 2, xiii, a subunit, deficiency; Familial adenomatous polyposis 1 and 3; Familial amyloid nephropathy with urticaria and deafness; Familial cold urticarial; Familial aplasia of the vermis; Familial benign pemphigus; Familial cancer of breast; Breast cancer, susceptibility to; Osteosarcoma; Pancreatic cancer 3; Familial cardiomyopathy; Familial cold autoinflammatory syndrome 2; Familial colorectal cancer; Familial exudative vitreoretinopathy, X-linked; Familial hemiplegic migraine types 1 and 2; Familial hypercholesterolemia; Familial hypertrophic cardiomyopathy 1, 2, 3, 4, 7, 10, 23 and 24; Familial hypokalemia-hypomagnesemia; Familial hypoplastic, glomerulocystic kidney; Familial infantile myasthenia; Familial juvenile gout; Familial Mediterranean fever and Familial mediterranean fever, autosomal dominant; Familial porencephaly; Familial porphyria cutanea tarda; Familial pulmonary capillary hemangiomatosis; Familial renal glucosuria; Familial renal hypouricemia; Familial restrictive cardiomyopathy 1; Familial type 1 and 3 hyperlipoproteinemia; Fanconi anemia, complementation group E, I, N, and O; Fanconi-Bickel syndrome; Favism, susceptibility to; Febrile seizures, familial, 11; Feingold syndrome 1; Fetal hemoglobin quantitative trait locus 1; FG syndrome and FG syndrome 4; Fibrosis of extraocular muscles, congenital, 1, 2, 3a (with or without extraocular involvement), 3b; Fish-eye disease; Fleck corneal dystrophy; Floating-Harbor syndrome; Focal epilepsy with speech disorder with or without mental retardation; Focal segmental glomerulosclerosis 5; Forebrain defects; Frank Ter Haar syndrome; Borrone Di Rocco Crovato syndrome; Frasier syndrome; Wilms tumor 1; Freeman-Sheldon syndrome; Frontometaphyseal dysplasia land 3; Frontotemporal dementia; Frontotemporal dementia and/or amyotrophic lateral sclerosis 3 and 4; Frontotemporal Dementia Chromosome 3-Linked and Frontotemporal dementia ubiquitin-positive; Fructose-biphosphatase deficiency; Fuhrmann syndrome; Gamma-aminobutyric acid transaminase deficiency; Gamstorp-Wohlfart syndrome; Gaucher disease type 1 and Subacute neuronopathic; Gaze palsy, familial horizontal, with progressive scoliosis; Generalized dominant dystrophic epidermolysis bullosa; Generalized epilepsy with febrile seizures plus 3, type 1, type 2; Epileptic encephalopathy Lennox-Gastaut type; Giant axonal neuropathy; Glanzmann thrombasthenia; Glaucoma 1, open angle, e, F, and G; Glaucoma 3, primary congenital, d; Glaucoma, congenital and Glaucoma, congenital, Coloboma; Glaucoma, primary open angle, juvenile-onset; Glioma susceptibility 1; Glucose transporter type 1 deficiency syndrome; Glucose-6-phosphate transport defect; GLUT1 deficiency syndrome 2; Epilepsy, idiopathic generalized, susceptibility to, 12; Glutamate formiminotransferase deficiency; Glutaric acidemia IIA and IIB; Glutaric aciduria, type 1; Gluthathione synthetase deficiency; Glycogen storage disease 0 (muscle), II (adult form), IXa2, IXc, type 1A; type II, type IV, IV (combined hepatic and myopathic), type V, and type VI; Goldmann-Favre syndrome; Gordon syndrome; Gorlin syndrome; Holoprosencephaly sequence; Holoprosencephaly 7; Granulomatous disease, chronic, X-linked, variant; Granulosa cell tumor of the ovary; Gray platelet syndrome; Griscelli syndrome type 3; Groenouw corneal dystrophy type I; Growth and mental retardation, mandibulofacial dysostosis, microcephaly, and cleft palate; Growth hormone deficiency with pituitary anomalies; Growth hormone insensitivity with immunodeficiency; GTP cyclohydrolase I deficiency; Hajdu-Cheney syndrome; Hand foot uterus syndrome; Hearing impairment; Hemangioma, capillary infantile; Hematologic neoplasm; Hemochromatosis type 1, 2B, and 3; Microvascular complications of diabetes 7; Transferrin serum level quantitative trait locus 2; Hemoglobin H disease, nondeletional; Hemolytic anemia, nonspherocytic, due to glucose phosphate isomerase deficiency; Hemophagocytic lymphohistiocytosis, familial, 2; Hemophagocytic lymphohistiocytosis, familial, 3; Heparin cofactor II deficiency; Hereditary acrodermatitis enteropathica; Hereditary breast and ovarian cancer syndrome; Ataxia-telangiectasia-like disorder; Hereditary diffuse gastric cancer; Hereditary diffuse leukoencephalopathy with spheroids; Hereditary factors II, IX, VIII deficiency disease; Hereditary hemorrhagic telangiectasia type 2; Hereditary insensitivity to pain with anhidrosis; Hereditary lymphedema type I; Hereditary motor and sensory neuropathy with optic atrophy; Hereditary myopathy with early respiratory failure; Hereditary neuralgic amyotrophy; Hereditary Nonpolyposis Colorectal Neoplasms; Lynch syndrome I and II; Hereditary pancreatitis; Pancreatitis, chronic, susceptibility to; Hereditary sensory and autonomic neuropathy type IIB amd IIA; Hereditary sideroblastic anemia; Hermansky-Pudlak syndrome 1, 3, 4, and 6; Heterotaxy, visceral, 2, 4, and 6, autosomal; Heterotaxy, visceral, X-linked; Heterotopia; Histiocytic medullary reticulosis; Histiocytosis-lymphadenopathy plus syndrome; Holocarboxylase synthetase deficiency; Holoprosencephaly 2, 3,7, and 9; Holt-Oram syndrome; Homocysteinemia due to MTHFR deficiency, CBS deficiency, and Homocystinuria, pyridoxine-responsive; Homocystinuria-Megaloblastic anemia due to defect in cobalamin metabolism, cblE complementation type; Howel-Evans syndrome; Hurler syndrome; Hutchinson-Gilford syndrome; Hydrocephalus; Hyperammonemia, type III; Hypercholesterolaemia and Hypercholesterolemia, autosomal recessive; Hyperekplexia 2 and Hyperekplexia hereditary; Hyperferritinemia cataract syndrome; Hyperglycinuria; Hyperimmunoglobulin D with periodic fever; Mevalonic aciduria; Hyperimmunoglobulin E syndrome; Hyperinsulinemic hypoglycemia familial 3, 4, and 5; Hyperinsulinism-hyperammonemia syndrome; Hyperlysinemia; Hypermanganesemia with dystonia, polycythemia and cirrhosis; Hyperornithinemia-hyperammonemia-homocitrullinuria syndrome; Hyperparathyroidism 1 and 2; Hyperparathyroidism, neonatal severe; Hyperphenylalaninemia, bh4-deficient, a, due to partial pts deficiency, BH4-deficient, D, and non-pku; Hyperphosphatasia with mental retardation syndrome 2, 3, and 4; Hypertrichotic osteochondrodysplasia; Hypobetalipoproteinemia, familial, associated with apob32; Hypocalcemia, autosomal dominant 1; Hypocalciuric hypercalcemia, familial, types 1 and 3; Hypochondrogenesis; Hypochromic microcytic anemia with iron overload; Hypoglycemia with deficiency of glycogen synthetase in the liver; Hypogonadotropic hypogonadism 11 with or without anosmia; Hypohidrotic ectodermal dysplasia with immune deficiency; Hypohidrotic X-linked ectodermal dysplasia; Hypokalemic periodic paralysis 1 and 2; Hypomagnesemia 1, intestinal; Hypomagnesemia, seizures, and mental retardation; Hypomyelinating leukodystrophy 7; Hypoplastic left heart syndrome; Atrioventricular septal defect and common atrioventricular junction; Hypospadias 1 and 2, X-linked; Hypothyroidism, congenital, nongoitrous, 1; Hypotrichosis 8 and 12; Hypotrichosis-lymphedema-telangiectasia syndrome; I blood group system; Ichthyosis bullosa of Siemens; Ichthyosis exfoliativa; Ichthyosis prematurity syndrome; Idiopathic basal ganglia calcification 5; Idiopathic fibrosing alveolitis, chronic form; Dyskeratosis congenita, autosomal dominant, 2 and 5; Idiopathic hypercalcemia of infancy; Immune dysfunction with T-cell inactivation due to calcium entry defect 2; Immunodeficiency 15, 16, 19, 30, 31C, 38, 40, 8, due to defect in cd3-zeta, with hyper IgM type 1 and 2, and X-Linked, with magnesium defect, Epstein-Barr virus infection, and neoplasia; Immunodeficiency-centromeric instability-facial anomalies syndrome 2; Inclusion body myopathy 2 and 3; Nonaka myopathy; Infantile convulsions and paroxysmal choreoathetosis, familial; Infantile cortical hyperostosis; Infantile GM1 gangliosidosis; Infantile hypophosphatasia; Infantile nephronophthisis; Infantile nystagmus, X-linked; Infantile Parkinsonism-dystonia; Infertility associated with multi-tailed spermatozoa and excessive DNA; Insulin resistance; Insulin-resistant diabetes mellitus and acanthosis nigricans; Insulin-dependent diabetes mellitus secretory diarrhea syndrome; Interstitial nephritis, karyomegalic; Intrauterine growth retardation, metaphyseal dysplasia, adrenal hypoplasia congenita, and genital anomalies; lodotyrosyl coupling defect; IRAK4 deficiency; Iridogoniodysgenesis dominant type and type 1; Iron accumulation in brain; Ischiopatellar dysplasia; Islet cell hyperplasia; Isolated 17,20-lyase deficiency; Isolated lutropin deficiency; Isovaleryl-CoA dehydrogenase deficiency; Jankovic Rivera syndrome; Jervell and Lange-Nielsen syndrome 2; Joubert syndrome 1, 6, 7, 9/15 (digenic), 14, 16, and 17, and Orofaciodigital syndrome xiv; Junctional epidermolysis bullosa gravis of Herlitz; Juvenile GM>1< gangliosidosis; Juvenile polyposis syndrome; Juvenile polyposis/hereditary hemorrhagic telangiectasia syndrome; Juvenile retinoschisis; Kabuki make-up syndrome; Kallmann syndrome 1, 2, and 6; Delayed puberty; Kanzaki disease; Karak syndrome; Kartagener syndrome; Kenny-Caffey syndrome type 2; Keppen-Lubinsky syndrome; Keratoconus 1; Keratosis follicularis; Keratosis palmoplantaris striata 1; Kindler syndrome; L-2-hydroxyglutaric aciduria; Larsen syndrome, dominant type; Lattice corneal dystrophy Type III; Leber amaurosis; Zellweger syndrome; Peroxisome biogenesis disorders; Zellweger syndrome spectrum; Leber congenital amaurosis 11, 12, 13, 16, 4, 7, and 9; Leber optic atrophy; Aminoglycoside-induced deafness; Deafness, nonsyndromic sensorineural, mitochondrial; Left ventricular noncompaction 5; Left-right axis malformations; Leigh disease; Mitochondrial short-chain Enoyl-CoA Hydratase 1 deficiency; Leigh syndrome due to mitochondrial complex I deficiency; Leiner disease; Leri Weill dyschondrosteosis; Lethal congenital contracture syndrome 6; Leukocyte adhesion deficiency type I and III; Leukodystrophy, Hypomyelinating, 11 and 6; Leukoencephalopathy with ataxia, with Brainstem and Spinal Cord Involvement and Lactate Elevation, with vanishing white matter, and progressive, with ovarian failure; Leukonychia totalis; Lewy body dementia; Lichtenstein-Knorr Syndrome; Li-Fraumeni syndrome 1; Lig4 syndrome; Limb-girdle muscular dystrophy, type 1B, 2A, 2B, 2D, C1, C5, C9, C14; Congenital muscular dystrophy-dystroglycanopathy with brain and eye anomalies, type A14 and B14; Lipase deficiency combined; Lipid proteinosis; Lipodystrophy, familial partial, type 2 and 3; Lissencephaly 1, 2 (X-linked), 3, 6 (with microcephaly), X-linked; Subcortical laminar heterotopia, X-linked; Liver failure acute infantile; Loeys-Dietz syndrome 1, 2, 3; Long QT syndrome 1, 2, 2/9, 2/5, (digenic), 3, 5 and 5, acquired, susceptibility to; Lung cancer; Lymphedema, hereditary, id; Lymphedema, primary, with myelodysplasia; Lymphoproliferative syndrome 1, 1 (X-linked), and 2; Lysosomal acid lipase deficiency; Macrocephaly, macrosomia, facial dysmorphism syndrome; Macular dystrophy, vitelliform, adult-onset; Malignant hyperthermia susceptibility type 1; Malignant lymphoma, non-Hodgkin; Malignant melanoma; Malignant tumor of prostate; Mandibuloacral dysostosis; Mandibuloacral dysplasia with type A or B lipodystrophy, atypical; Mandibulofacial dysostosis, Treacher Collins type, autosomal recessive; Mannose-binding protein deficiency; Maple syrup urine disease type 1A and type 3; Marden Walker like syndrome; Marfan syndrome; Marinesco-Sj\xc3\xb6gren syndrome; Martsolf syndrome; Maturity-onset diabetes of the young, type 1, type 2, type 11, type 3, and type 9; May-Hegglin anomaly; MYH9 related disorders; Sebastian syndrome; McCune-Albright syndrome; Somatotroph adenoma; Sex cord-stromal tumor; Cushing syndrome; McKusick Kaufman syndrome; McLeod neuroacanthocytosis syndrome; Meckel-Gruber syndrome; Medium-chain acyl-coenzyme A dehydrogenase deficiency; Medulloblastoma; Megalencephalic leukoencephalopathy with subcortical cysts land 2a; Megalencephaly cutis marmorata telangiectatica congenital; PIK3CA Related Overgrowth Spectrum; Megalencephaly-polymicrogyria-polydactyly-hydrocephalus syndrome 2; Megaloblastic anemia, thiamine-responsive, with diabetes mellitus and sensorineural deafness; Meier-Gorlin syndromes land 4; Melnick-Needles syndrome; Meningioma; Mental retardation, X-linked, 3, 21, 30, and 72; Mental retardation and microcephaly with pontine and cerebellar hypoplasia; Mental retardation X-linked syndromic 5; Mental retardation, anterior maxillary protrusion, and strabismus; Mental retardation, autosomal dominant 12, 13, 15, 24, 3, 30, 4, 5, 6,and 9; Mental retardation, autosomal recessive 15, 44, 46, and 5; Mental retardation, stereotypic movements, epilepsy, and/or cerebral malformations; Mental retardation, syndromic, Claes-Jensen type, X-linked; Mental retardation, X-linked, nonspecific, syndromic, Hedera type, and syndromic, wu type; Merosin deficient congenital muscular dystrophy; Metachromatic leukodystrophy juvenile, late infantile, and adult types; Metachromatic leukodystrophy; Metatrophic dysplasia; Methemoglobinemia types I and 2; Methionine adenosyltransferase deficiency, autosomal dominant; Methylmalonic acidemia with homocystinuria; Methylmalonic aciduria cblB type; Methylmalonic aciduria due to methylmalonyl-CoA mutase deficiency; METHYLMALONIC ACIDURIA, mut(0) TYPE; Microcephalic osteodysplastic primordial dwarfism type 2; Microcephaly with or without chorioretinopathy, lymphedema, or mental retardation; Microcephaly, hiatal hernia and nephrotic syndrome; Microcephaly; Hypoplasia of the corpus callosum; Spastic paraplegia 50, autosomal recessive; Global developmental delay; CNS hypomyelination; Brain atrophy; Microcephaly, normal intelligence and immunodeficiency; Microcephaly-capillary malformation syndrome; Microcytic anemia; Microphthalmia syndromic 5, 7, and 9; Microphthalmia, isolated 3, 5, 6, 8, and with coloboma 6; Microspherophakia; Migraine, familial basilar; Miller syndrome; Minicore myopathy with external ophthalmoplegia; Myopathy, congenital with cores; Mitchell-Riley syndrome; mitochondrial 3-hydroxy-3-methylglutaryl-CoA synthase deficiency; Mitochondrial complex I, II, III, III (nuclear type 2, 4, or 8) deficiency; Mitochondrial DNA depletion syndrome 11, 12 (cardiomyopathic type), 2, 4B (MNGIE type), 8B (MNGIE type); Mitochondrial DNA-depletion syndrome 3 and 7, hepatocerebral types, and 13 (encephalomyopathic type); Mitochondrial phosphate carrier and pyruvate carrier deficiency; Mitochondrial trifunctional protein deficiency; Long-chain 3-hydroxyacyl-CoA dehydrogenase deficiency; Miyoshi muscular dystrophy 1; Myopathy, distal, with anterior tibial onset; Mohr-Tranebjaerg syndrome; Molybdenum cofactor deficiency, complementation group A; Mowat-Wilson syndrome; Mucolipidosis III Gamma; Mucopolysaccharidosis type VI, type VI (severe), and type VII; Mucopolysaccharidosis, MPS-I-H/S, MPS-II, MPS-III-A, MPS-III-B, MPS-III-C, MPS-IV-A, MPS-IV-B; Retinitis Pigmentosa 73; Gangliosidosis GM1 typel (with cardiac involvement) 3; Multicentric osteolysis nephropathy; Multicentric osteolysis, nodulosis and arthropathy; Multiple congenital anomalies; Atrial septal defect 2; Multiple congenital anomalies-hypotonia-seizures syndrome 3; Multiple Cutaneous and Mucosal Venous Malformations; Multiple endocrine neoplasia, types land 4; Multiple epiphyseal dysplasia 5 or Dominant; Multiple gastrointestinal atresias; Multiple pterygium syndrome Escobar type; Multiple sulfatase deficiency; Multiple synostoses syndrome 3; Muscle AMP guanine oxidase deficiency; Muscle eye brain disease; Muscular dystrophy, congenital, megaconial type; Myasthenia, familial infantile, 1; Myasthenic Syndrome, Congenital, 11, associated with acetylcholine receptor deficiency; Myasthenic Syndrome, Congenital, 17, 2A (slow-channel), 4B (fast-channel), and without tubular aggregates; Myeloperoxidase deficiency; MYH-associated polyposis; Endometrial carcinoma; Myocardial infarction 1; Myoclonic dystonia; Myoclonic-Atonic Epilepsy; Myoclonus with epilepsy with ragged red fibers; Myofibrillar myopathy 1 and ZASP-related; Myoglobinuria, acute recurrent, autosomal recessive; Myoneural gastrointestinal encephalopathy syndrome; Cerebellar ataxia infantile with progressive external ophthalmoplegia; Mitochondrial DNA depletion syndrome 4B, MNGIE type; Myopathy, centronuclear, 1, congenital, with excess of muscle spindles, distal, 1, lactic acidosis, and sideroblastic anemia 1, mitochondrial progressive with congenital cataract, hearing loss, and developmental delay, and tubular aggregate, 2; Myopia 6; Myosclerosis, autosomal recessive; Myotonia congenital; Congenital myotonia, autosomal dominant and recessive forms; Nail-patella syndrome; Nance-Horan syndrome; Nanophthalmos 2; Navajo neurohepatopathy; Nemaline myopathy 3 and 9; Neonatal hypotonia; Intellectual disability; Seizures; Delayed speech and language development; Mental retardation, autosomal dominant 31; Neonatal intrahepatic cholestasis caused by citrin deficiency; Nephrogenic diabetes insipidus, Nephrogenic diabetes insipidus, X-linked; Nephrolithiasis/osteoporosis, hypophosphatemic, 2; Nephronophthisis 13, 15 and 4; Infertility; Cerebello-oculo-renal syndrome (nephronophthisis, oculomotor apraxia and cerebellar abnormalities); Nephrotic syndrome, type 3, type 5, with or without ocular abnormalities, type 7, and type 9; Nestor-Guillermo progeria syndrome; Neu-Laxova syndrome 1; Neurodegeneration with brain iron accumulation 4 and 6; Neuroferritinopathy; Neurofibromatosis, type land type 2; Neurofibrosarcoma; Neurohypophyseal diabetes insipidus; Neuropathy, Hereditary Sensory, Type IC; Neutral 1 amino acid transport defect; Neutral lipid storage disease with myopathy; Neutrophil immunodeficiency syndrome; Nicolaides-Baraitser syndrome; Niemann-Pick disease type Cl, C2, type A, and type Cl, adult form; Non-ketotic hyperglycinemia; Noonan syndrome 1 and 4, LEOPARD syndrome 1; Noonan syndrome-like disorder with or without juvenile myelomonocytic leukemia; Normokalemic periodic paralysis, potassium-sensitive; Norum disease; Epilepsy, Hearing Loss, And Mental Retardation Syndrome; Mental Retardation, X-Linked 102 and syndromic 13; Obesity; Ocular albinism, type I; Oculocutaneous albinism type 1B, type 3, and type 4; Oculodentodigital dysplasia; Odontohypophosphatasia; Odontotrichomelic syndrome; Oguchi disease; Oligodontia-colorectal cancer syndrome; Opitz G/BBB syndrome; Optic atrophy 9; Oral-facial-digital syndrome; Ornithine aminotransferase deficiency; Orofacial cleft 11 and 7, Cleft lip/palate-ectodermal dysplasia syndrome; Orstavik Lindemann Solberg syndrome; Osteoarthritis with mild chondrodysplasia; Osteochondritis dissecans; Osteogenesis imperfecta type 12, type 5, type 7, type 8, type I, type III, with normal sclerae, dominant form, recessive perinatal lethal; Osteopathia striata with cranial sclerosis; Osteopetrosis autosomal dominant type 1 and 2, recessive 4, recessive 1, recessive 6; Osteoporosis with pseudoglioma; Oto-palato-digital syndrome, types I and II; Ovarian dysgenesis 1; Ovarioleukodystrophy; Pachyonychia congenita 4 and type 2; Paget disease of bone, familial; Pallister-Hall syndrome; Palmoplantar keratoderma, nonepidermolytic, focal or diffuse; Pancreatic agenesis and congenital heart disease; Papillon-Lef\xc3\xa8vre syndrome; Paragangliomas 3; Paramyotonia congenita of von Eulenburg; Parathyroid carcinoma; Parkinson disease 14, 15, 19 (juvenile-onset), 2, 20 (early-onset), 6, (autosomal recessive early-onset, and 9; Partial albinism; Partial hypoxanthine-guanine phosphoribosyltransferase deficiency; Patterned dystrophy of retinal pigment epithelium; PC-K6a; Pelizaeus-Merzbacher disease; Pendred syndrome; Peripheral demyelinating neuropathy, central dysmyelination; Hirschsprung disease; Permanent neonatal diabetes mellitus; Diabetes mellitus, permanent neonatal, with neurologic features; Neonatal insulin-dependent diabetes mellitus; Maturity-onset diabetes of the young, type 2; Peroxisome biogenesis disorder 14B, 2A, 4A, 5B, 6A, 7A, and 7B; Perrault syndrome 4; Perry syndrome; Persistent hyperinsulinemic hypoglycemia of infancy; familial hyperinsulinism; Phenotypes; Phenylketonuria; Pheochromocytoma; Hereditary Paraganglioma-Pheochromocytoma Syndromes; Paragangliomas 1; Carcinoid tumor of intestine; Cowden syndrome 3; Phosphoglycerate dehydrogenase deficiency; Phosphoglycerate kinase 1 deficiency; Photosensitive trichothiodystrophy; Phytanic acid storage disease; Pick disease; Pierson syndrome; Pigmentary retinal dystrophy; Pigmented nodular adrenocortical disease, primary, 1; Pilomatrixoma; Pitt-Hopkins syndrome; Pituitary dependent hypercortisolism; Pituitary hormone deficiency, combined 1, 2, 3, and 4; Plasminogen activator inhibitor type 1 deficiency; Plasminogen deficiency, type I; Platelet-type bleeding disorder 15 and 8; Poikiloderma, hereditary fibrosing, with tendon contractures, myopathy, and pulmonary fibrosis; Polycystic kidney disease 2, adult type, and infantile type; Polycystic lipomembranous osteodysplasia with sclerosing leukoencephalopathy; Polyglucosan body myopathy 1 with or without immunodeficiency; Polymicrogyria, asymmetric, bilateral frontoparietal; Polyneuropathy, hearing loss, ataxia, retinitis pigmentosa, and cataract; Pontocerebellar hypoplasia type 4; Popliteal pterygium syndrome; Porencephaly 2; Porokeratosis 8, disseminated superficial actinic type; Porphobilinogen synthase deficiency; Porphyria cutanea tarda; Posterior column ataxia with retinitis pigmentosa; Posterior polar cataract type 2; Prader-Willi-like syndrome; Premature ovarian failure 4, 5, 7, and 9; Primary autosomal recessive microcephaly 10, 2, 3, and 5; Primary ciliary dyskinesia 24; Primary dilated cardiomyopathy; Left ventricular noncompaction 6; 4, Left ventricular noncompaction 10; Paroxysmal atrial fibrillation; Primary hyperoxaluria, type I, type, and type III; Primary hypertrophic osteoarthropathy, autosomal recessive 2; Primary hypomagnesemia; Primary open angle glaucoma juvenile onset 1; Primary pulmonary hypertension; Primrose syndrome; Progressive familial heart block type 1B; Progressive familial intrahepatic cholestasis 2 and 3; Progressive intrahepatic cholestasis; Progressive myoclonus epilepsy with ataxia; Progressive pseudorheumatoid dysplasia; Progressive sclerosing poliodystrophy; Prolidase deficiency; Proline dehydrogenase deficiency; Schizophrenia 4; Properdin deficiency, X-linked; Propionic academia; Proprotein convertase 1/3 deficiency; Prostate cancer, hereditary, 2; Protan defect; Proteinuria; Finnish congenital nephrotic syndrome; Proteus syndrome; Breast adenocarcinoma; Pseudoachondroplastic spondyloepiphyseal dysplasia syndrome; Pseudohypoaldosteronism type 1 autosomal dominant and recessive and type 2; Pseudohypoparathyroidism type 1A, Pseudopseudohypoparathyroidism; Pseudoneonatal adrenoleukodystrophy; Pseudoprimary hyperaldosteronism; Pseudoxanthoma elasticum; Generalized arterial calcification of infancy 2; Pseudoxanthoma elasticum-like disorder with multiple coagulation factor deficiency; Psoriasis susceptibility 2; PTEN hamartoma tumor syndrome; Pulmonary arterial hypertension related to hereditary hemorrhagic telangiectasia; Pulmonary Fibrosis And/Or Bone Marrow Failure, Telomere-Related, 1 and 3; Pulmonary hypertension, primary, 1, with hereditary hemorrhagic telangiectasia; Purine-nucleoside phosphorylase deficiency; Pyruvate carboxylase deficiency; Pyruvate dehydrogenase El-alpha deficiency; Pyruvate kinase deficiency of red cells; Raine syndrome; Rasopathy; Recessive dystrophic epidermolysis bullosa; Nail disorder, nonsyndromic congenital, 8; Reifenstein syndrome; Renal adysplasia; Renal carnitine transport defect; Renal coloboma syndrome; Renal dysplasia; Renal dysplasia, retinal pigmentary dystrophy, cerebellar ataxia and skeletal dysplasia; Renal tubular acidosis, distal, autosomal recessive, with late-onset sensorineural hearing loss, or with hemolytic anemia; Renal tubular acidosis, proximal, with ocular abnormalities and mental retardation; Retinal cone dystrophy 3B; Retinitis pigmentosa; Retinitis pigmentosa 10, 11, 12, 14, 15, 17, and 19; Retinitis pigmentosa 2, 20, 25, 35, 36, 38, 39, 4, 40, 43, 45, 48, 66, 7, 70, 72; Retinoblastoma; Rett disorder; Rhabdoid tumor predisposition syndrome 2; Rhegmatogenous retinal detachment, autosomal dominant; Rhizomelic chondrodysplasia punctata type 2 and type 3; Roberts-SC phocomelia syndrome; Robinow Sorauf syndrome; Robinow syndrome, autosomal recessive, autosomal recessive, with brachy-syn-polydactyly; Rothmund-Thomson syndrome; Rapadilino syndrome; RRM2B-related mitochondrial disease; Rubinstein-Taybi syndrome; Salla disease; Sandhoff disease, adult and infantil types; Sarcoidosis, early-onset; Blau syndrome; Schindler disease, type 1; Schizencephaly; Schizophrenia 15; Schneckenbecken dysplasia; Schwannomatosis 2; Schwartz Jampel syndrome type 1; Sclerocornea, autosomal recessive; Sclerosteosis; Secondary hypothyroidism; Segawa syndrome, autosomal recessive; Senior-Loken syndrome 4 and 5, ; Sensory ataxic neuropathy, dysarthria, and ophthalmoparesis; Sepiapterin reductase deficiency; SeSAME syndrome; Severe combined immunodeficiency due to ADA deficiency, with microcephaly, growth retardation, and sensitivity to ionizing radiation, atypical, autosomal recessive, T cell-negative, B cell-positive, NK cell-negative of NK-positive; Severe congenital neutropenia; Severe congenital neutropenia 3, autosomal recessive or dominant; Severe congenital neutropenia and 6, autosomal recessive; Severe myoclonic epilepsy in infancy; Generalized epilepsy with febrile seizures plus, types 1 and 2; Severe X-linked myotubular myopathy; Short QT syndrome 3; Short stature with nonspecific skeletal abnormalities; Short stature, auditory canal atresia, mandibular hypoplasia, skeletal abnormalities; Short stature, onychodysplasia, facial dysmorphism, and hypotrichosis; Primordial dwarfism; Short-rib thoracic dysplasia 11 or 3 with or without polydactyly; Sialidosis type I and II; Silver spastic paraplegia syndrome; Slowed nerve conduction velocity, autosomal dominant; Smith-Lemli-Opitz syndrome; Snyder Robinson syndrome; Somatotroph adenoma; Prolactinoma; familial, Pituitary adenoma predisposition; Sotos syndrome 1 or 2; Spastic ataxia 5, autosomal recessive, Charlevoix-Saguenay type, 1,10, or 11, autosomal recessive; Amyotrophic lateral sclerosis type 5; Spastic paraplegia 15, 2, 3, 35, 39, 4, autosomal dominant, 55, autosomal recessive, and 5A; Bile acid synthesis defect, congenital, 3; Spermatogenic failure 11, 3, and 8; Spherocytosis types 4 and 5; Spheroid body myopathy; Spinal muscular atrophy, lower extremity predominant 2, autosomal dominant; Spinal muscular atrophy, type II; Spinocerebellar ataxia 14, 21, 35, 40,and 6; Spinocerebellar ataxia autosomal recessive 1 and 16; Splenic hypoplasia; Spondylocarpotarsal synostosis syndrome; Spondylocheirodysplasia, Ehlers-Danlos syndrome-like, with immune dysregulation, Aggrecan type, with congenital joint dislocations, short limb-hand type, Sedaghatian type, with cone-rod dystrophy, and Kozlowski type; Parastremmatic dwarfism; Stargardt disease 1; Cone-rod dystrophy 3; Stickler syndrome type 1; Kniest dysplasia; Stickler syndrome, types 1(nonsyndromic ocular) and 4; Sting-associated vasculopathy, infantile-onset; Stormorken syndrome; Sturge-Weber syndrome, Capillary malformations, congenital, 1; Succinyl-CoA acetoacetate transferase deficiency; Sucrase-isomaltase deficiency; Sudden infant death syndrome; Sulfite oxidase deficiency, isolated; Supravalvar aortic stenosis; Surfactant metabolism dysfunction, pulmonary, 2 and 3; Symphalangism, proximal, lb; Syndactyly Cenani Lenz type; Syndactyly type 3; Syndromic X-linked mental retardation 16; Talipes equinovarus; Tangier disease; TARP syndrome; Tay-Sachs disease, B1 variant, Gm2-gangliosidosis (adult), Gm2-gangliosidosis (adult-onset); Temtamy syndrome; Tenorio Syndrome; Terminal osseous dysplasia; Testosterone 17-beta-dehydrogenase deficiency; Tetraamelia, autosomal recessive; Tetralogy of Fallot; Hypoplastic left heart syndrome 2; Truncus arteriosus; Malformation of the heart and great vessels; Ventricular septal defect 1; Thiel-Behnke corneal dystrophy; Thoracic aortic aneurysms and aortic dissections; Marfanoid habitus; Three M syndrome 2; Thrombocytopenia, platelet dysfunction, hemolysis, and imbalanced globin synthesis; Thrombocytopenia, X-linked; Thrombophilia, hereditary, due to protein C deficiency, autosomal dominant and recessive; Thyroid agenesis; Thyroid cancer, follicular; Thyroid hormone metabolism, abnormal; Thyroid hormone resistance, generalized, autosomal dominant; Thyrotoxic periodic paralysis and Thyrotoxic periodic paralysis 2; Thyrotropin-releasing hormone resistance, generalized; Timothy syndrome; TNF receptor-associated periodic fever syndrome (TRAPS); Tooth agenesis, selective, 3 and 4; Torsades de pointes; Townes-Brocks-branchiootorenal-like syndrome; Transient bullous dermolysis of the newborn; Treacher collins syndrome 1; Trichomegaly with mental retardation, dwarfism and pigmentary degeneration of retina; Trichorhinophalangeal dysplasia type I; Trichorhinophalangeal syndrome type 3; Trimethylaminuria; Tuberous sclerosis syndrome; Lymphangiomyomatosis; Tuberous sclerosis 1 and 2; Tyrosinase-negative oculocutaneous albinism; Tyrosinase-positive oculocutaneous albinism; Tyrosinemia type I; UDPglucose-4-epimerase deficiency; Ullrich congenital muscular dystrophy; Ulna and fibula absence of with severe limb deficiency; Upshaw-Schulman syndrome; Urocanate hydratase deficiency; Usher syndrome, types 1, 1B, 1D, 1G, 2A, 2C, and 2D; Retinitis pigmentosa 39; UV-sensitive syndrome; Van der Woude syndrome; Van Maldergem syndrome 2; Hennekam lymphangiectasia-lymphedema syndrome 2; Variegate porphyria; Ventriculomegaly with cystic kidney disease; Verheij syndrome; Very long chain acyl-CoA dehydrogenase deficiency; Vesicoureteral reflux 8; Visceral heterotaxy 5, autosomal; Visceral myopathy; Vitamin D-dependent rickets, types land 2; Vitelliform dystrophy ; von Willebrand disease type 2M and type 3; Waardenburg syndrome type 1, 4C, and 2E (with neurologic involvement); Klein-Waardenberg syndrome; Walker-Warburg congenital muscular dystrophy; Warburg micro syndrome 2 and 4; Warts, hypogammaglobulinemia, infections, and myelokathexis; Weaver syndrome; Weill-Marchesani syndrome 1 and 3; Weill-Marchesani-like syndrome; Weissenbacher-Zweymuller syndrome; Werdnig-Hoffmann disease; Charcot-Marie-Tooth disease; Werner syndrome; WFS1-Related Disorders; Wiedemann-Steiner syndrome; Wilson disease; Wolfram-like syndrome, autosomal dominant; Worth disease; Van Buchem disease type 2; Xeroderma pigmentosum, complementation group b, group D, group E, and group G; X-linked agammaglobulinemia; X-linked hereditary motor and sensory neuropathy; X-linked ichthyosis with steryl-sulfatase deficiency; X-linked periventricular heterotopia; Oto-palato-digital syndrome, type I; X-linked severe combined immunodeficiency; Zimmermann-Laband syndrome and Zimmermann-Laband syndrome 2; and Zonular pulverulent cataract 3.

[1441] The target nucleotide sequence may comprise a target sequence (e.g., a point mutation) associated with a disease, disorder, or condition. The target sequence may comprise a T to C (or A to G) point mutation associated with a disease, disorder, or condition, and wherein the deamination of the mutant C base results in mismatch repair-mediated correction to a sequence that is not associated with a disease, disorder, or condition. The target sequence may comprise a G to A (or C to T) point mutation associated with a disease, disorder, or condition, and wherein the deamination of the mutant A base results in mismatch repair-mediated correction to a sequence that is not associated with a disease, disorder, or condition. The target sequence may encode a protein, and where the point mutation is in a codon and results in a change in the amino acid encoded by the mutant codon as compared to a wild-type codon. The target sequence may also be at a splice site, and the point mutation results in a change in the splicing of an mRNA transcript as compared to a wild-type transcript. In addition, the target may be at a non-coding sequence of a gene, such as a promoter, and the point mutation results in increased or decreased expression of the gene.

[1442] Thus, in some aspects, the deamination of a mutant C results in a change of the amino acid encoded by the mutant codon, which in some cases can result in the expression of a wild-type amino acid. In other aspects, the deamination of a mutant A results in a change of the amino acid encoded by the mutant codon, which in some cases can result in the expression of a wild-type amino acid.

[1443] The methods described herein involving contacting a cell with a composition or rAAV particle can occur in vitro, ex vivo, or in vivo. In certain embodiments, the step of contacting occurs in a subject. In certain embodiments, the subject has been diagnosed with a disease, disorder, or condition.

[1444] In some embodiments, the methods disclosed herein involve contacting a mammalian cell with a composition or rAAV particle. In particular embodiments, the methods involve contacting a retinal cell, cortical cell or cerebellar cell.

[1445] The split Cas9 protein or split prime editor delivered using the methods described herein preferably have comparable activity compared to the original Cas9 protein or prime editor (i.e., unsplit protein delivered to a cell or expressed in a cell as a whole). For example, the split Cas9 protein or split prime editor retains at least 50% (e.g., at least 50%, at least 60%, at least 70%, at least 80%, at least 90%, at least 95%, at least 98%, at least 99%, or 100%) of the activity of the original Cas9 protein or prime editor. In some embodiments, the split Cas9 protein or split prime editor is more active (e.g., 2-fold, 5-fold, 10-fold, 100-fold, 1000-fold, or more) than that of an original Cas9 protein or prime editor.

[1446] The compositions described herein may be administered to a subject in need thereof in a therapeutically effective amount to treat and/or prevent a disease or disorder the subject is suffering from. Any disease or disorder that maybe treated and/or prevented using CRISPR/Cas9-based genome-editing technology may be treated by the split Cas9 protein or the split multi-flap prime editor described herein. It is to be understood that, if the nucleotide sequences encoding the split Cas9 protein or the multi-flap prime editor does not further encode a gRNA, a separate nucleic acid vector encoding the gRNA may be administered together with the compositions described herein.

[1447] Exemplary suitable diseases, disorders or conditions include, without limitation the disease or disorder is selected from the group consisting of: cystic fibrosis, phenylketonuria, epidermolytic hyperkeratosis (EHK), chronic obstructive pulmonary disease (COPD), Charcot-Marie-Toot disease type 4J, neuroblastoma (NB), von Willebrand disease (vWD), myotonia congenital, hereditary renal amyloidosis, dilated cardiomyopathy, hereditary lymphedema, familial Alzheimer's disease, prion disease, chronic infantile neurologic cutaneous articular syndrome (CINCA), congenital deafness, Niemann-Pick disease type C (NPC) disease, and desmin-related myopathy (DRM). In particular embodiments, the disease or condition is Niemann-Pick disease type C (NPC) disease.

[1448] In some embodiments, the disease, disorder or condition is associated with a point mutation in an NPC gene, a DNMT1 gene, a PCSK9 gene, or a TMC1 gene. In certain embodiments, the point mutation is a T3182C mutation in NPC, which results in an I1061T amino acid substitution.

[1449] In certain embodiments, the point mutation is an A545G mutation in TMC1, which results in a Y182C amino acid substitution. TMC1 encodes a protein that forms mechanosensitive ion channels in sensory hair cells of the inner ear and is required for normal auditory function. The Y182C amino acid substitution is associated with congenital deafness.

[1450] In some embodiments, the disease, disorder or condition is associated with a point mutation that generates a stop codon, for example, a premature stop codon within the coding region of a gene.

[1451] Additional exemplary diseases, disorders and conditions include cystic fibrosis (see, e.g., Schwank et al., Functional repair of CFTR by CRISPR/Cas9 in intestinal stem cell organoids of cystic fibrosis patients. Cell stem cell. 2013; 13: 653-658; and Wu et. al., Correction of a genetic disease in mouse via use of CRISPR-Cas9. Cell stem cell. 2013; 13: 659-662, neither of which uses a deaminase fusion protein to correct the genetic defect); phenylketonuria—e.g., phenylalanine to serine mutation at position 835 (mouse) or 240 (human) or a homologous residue in phenylalanine hydroxylase gene (T>C mutation)—see, e.g., McDonald et al., Genomics. 1997; 39:402-405; Bernard-Soulier syndrome (BSS)—e.g., phenylalanine to serine mutation at position 55 or a homologous residue, or cysteine to arginine at residue 24 or a homologous residue in the platelet membrane glycoprotein IX (T>C mutation)—see, e.g., Noris et al., British Journal of Haematology. 1997; 97: 312-320, and Ali et al., Hematol. 2014; 93: 381-384; epidermolytic hyperkeratosis (EHK)—e.g., leucine to proline mutation at position 160 or 161 (if counting the initiator methionine) or a homologous residue in keratin 1 (T>C mutation)—see, e.g., Chipev et al., Cell. 1992; 70: 821-828, see also accession number P04264 in the UNIPROT database at www[dot]uniprot[dot]org; chronic obstructive pulmonary disease (COPD)—e.g., leucine to proline mutation at position 54 or 55 (if counting the initiator methionine) or a homologous residue in the processed form of α₁-antitrypsin or residue 78 in the unprocessed form or a homologous residue (T>C mutation)—see, e.g., Poller et al., Genomics. 1993; 17: 740-743, see also accession number P01011 in the UNIPROT database; Charcot-Marie-Toot disease type 4J—e.g., isoleucine to threonine mutation at position 41 or a homologous residue in FIG4 (T>C mutation)—see, e.g., Lenk et al., PLoS Genetics. 2011; 7: e1002104; neuroblastoma (NB)—e.g., leucine to proline mutation at position 197 or a homologous residue in Caspase-9 (T>C mutation)—see, e.g., Kundu et al., 3 Biotech. 2013, 3:225-234; von Willebrand disease (vWD)—e.g., cysteine to arginine mutation at position 509 or a homologous residue in the processed form of von Willebrand factor, or at position 1272 or a homologous residue in the unprocessed form of von Willebrand factor (T>C mutation)—see, e.g., Lavergne et al., Br. J. Haematol. 1992, see also accession number P04275 in the UNIPROT database; 82: 66-72; myotonia congenital—e.g., cysteine to arginine mutation at position 277 or a homologous residue in the muscle chloride channel gene CLCN1 (T>C mutation)—see, e.g., Weinberger et al., The J. of Physiology. 2012; 590: 3449-3464; hereditary renal amyloidosis—e.g., stop codon to arginine mutation at position 78 or a homologous residue in the processed form of apolipoprotein All or at position 101 or a homologous residue in the unprocessed form (T>C mutation)—see, e.g., Yazaki et al., Kidney Int. 2003; 64: 11-16; dilated cardiomyopathy (DCM)—e.g., tryptophan to Arginine mutation at position 148 or a homologous residue in the FOXD4 gene (T>C mutation), see, e.g., Minoretti et. al., Int. J. of Mol. Med. 2007; 19: 369-372; hereditary lymphedema—e.g., histidine to arginine mutation at position 1035 or a homologous residue in VEGFR3 tyrosine kinase (A>G mutation), see, e.g., Irrthum et al., Am. J. Hum. Genet. 2000; 67: 295-301; familial Alzheimer's disease—e.g., isoleucine to valine mutation at position 143 or a homologous residue in presenilinl (A>G mutation), see, e.g., Gallo et. al., J. Alzheimer's disease. 2011; 25: 425-431; Prion disease—e.g., methionine to valine mutation at position 129 or a homologous residue in prion protein (A>G mutation)—see, e.g., Lewis et. al., J. of General Virology. 2006; 87: 2443-2449; chronic infantile neurologic cutaneous articular syndrome (CINCA)—e.g., Tyrosine to Cysteine mutation at position 570 or a homologous residue in cryopyrin (A>G mutation)—see, e.g., Fujisawa et. al. Blood. 2007; 109: 2903-2911; and desmin-related myopathy (DRM)—e.g., arginine to glycine mutation at position 120 or a homologous residue in αβ crystallin (A>G mutation)—see, e.g., Kumar et al., J. Biol. Chem. 1999; 274: 24137-24141. The entire contents of all references and database entries is incorporated herein by reference.

### Trinucleotide Repeat Expansion Disease

[1452] Trinucleotide repeat expansion is associated with a number of human diseases, including Huntington's Disease, Fragile X syndrome, and Friedreich's ataxia. The most common trinucleotide repeat contains CAG triplets, though GAA triplets (Friedreich's ataxia) and CGG triplets (Fragile X syndrome) also occur. Inheriting a predisposition to expansion, or acquiring an already expanded parental allele, increases the likelihood of acquiring the disease. Pathogenic expansions of trinucleotide repeats could hypothetically be corrected using multi-flap prime editing.

[1453] A region upstream of the repeat region can be nicked by an RNA-guided nuclease, then used to prime synthesis of a new DNA strand that contains a healthy number of repeats (which depends on the particular gene and disease), in accordance with the general mechanism outlined in FIG. 1G or FIG. 22. After the repeat sequence, a short stretch of homology is added that matches the identity of the sequence adjacent to the other end of the repeat (red strand). Invasion of the newly synthesized strand by the TPRT system, and subsequent replacement of the endogenous DNA with the newly synthesized flap, leads to a contracted repeat allele. The term “contracted” refers to a shortening of the length of the nucleotide repeat region, thereby resulting in repairing the trinucleotide repeat region.

[1454] The multi-flap prime editing systems (e.g., dual-flap and quadruple-flap prime editing systems) described herein may be used to contract trinucleotide repeat mutations (or “triplet expansion diseases”) to treating conditions such as Huntington's disease and other trinucleotide repeat disorders. Trinucleotide repeat expansion disorders are complex, progressive disorders that involve developmental neurobiology and often affect cognition as well as sensori-motor functions. The disorders show genetic anticipation (i.e. increased severity with each generation). The DNA expansions or contractions usually happen meiotically (i.e. during the time of gametogenesis, or early in embryonic development), and often have sex-bias meaning that some genes expand only when inherited through the female, others only through the male. In humans, trinucleotide repeat expansion disorders can cause gene silencing at either the transcriptional or translational level, which essentially knocks out gene function. Alternatively, trinucleotide repeat expansion disorders can cause altered proteins generated with large repetitive amino acid sequences that either abrogate or change protein function, often in a dominant-negative manner (e.g. poly-glutamine diseases).

[1455] Without wishing to be bound by theory, triplet expansion is caused by slippage during DNA replication or during DNA repair synthesis. Because the tandem repeats have identical sequence to one another, base pairing between two DNA strands can take place at multiple points along the sequence. This may lead to the formation of “loop out” structures during DNA replication or DNA repair synthesis. This may lead to repeated copying of the repeated sequence, expanding the number of repeats. Additional mechanisms involving hybrid RNA:DNA intermediates have been proposed. Multi-flap prime editing may be used to reduce or eliminate these triplet expansion regions by deletion one or more or the offending repeat codon triplets. In an embodiment of this use, FIG. 23, provides a schematic of a PEgRNA design for contracting or reducing trinucleotide repeat sequences with prime editing.

[1456] Multi-flap prime editing may be implemented to contract triplet expansion regions by nicking a region upstream of the triplet repeat region with the prime editor comprising a PEgRNA appropriated targeted to the cut site. The prime editor then synthesizes a new DNA strand (ssDNA flap) based on the PEgRNA as a template (i.e., the edit template thereof) that codes for a healthy number of triplet repeats (which depends on the particular gene and disease). The newly synthesized ssDNA strand comprising the healthy triplet repeat sequence also is synthesized to include a short stretch of homology (i.e., the homology arm) that matches the sequence adjacent to the other end of the repeat (red strand). Invasion of the newly synthesized strand, and subsequent replacement of the endogenous DNA with the newly synthesized ssDNA flap, leads to a contracted repeat allele.

[1457] Depending on the particular trinucleotide expansion disorder, the defect-inducing triplet expansions may occur in “trinucleotide repeat expansion proteins.” Trinucleotide repeat expansion proteins are a diverse set of proteins associated with susceptibility for developing a trinucleotide repeat expansion disorder, the presence of a trinucleotide repeat expansion disorder, the severity of a trinucleotide repeat expansion disorder or any combination thereof. Trinucleotide repeat expansion disorders are divided into two categories determined by the type of repeat. The most common repeat is the triplet CAG, which, when present in the coding region of a gene, codes for the amino acid glutamine (Q). Therefore, these disorders are referred to as the polyglutamine (polyQ) disorders and comprise the following diseases: Huntington Disease (HD); Spinobulbar Muscular Atrophy (SBMA); Spinocerebellar Ataxias (SCA types 1, 2, 3, 6, 7, and 17); and Dentatorubro-Pallidoluysian Atrophy (DRPLA). The remaining trinucleotide repeat expansion disorders either do not involve the CAG triplet or the CAG triplet is not in the coding region of the gene and are, therefore, referred to as the non-polyglutamine disorders. The non-polyglutamine disorders comprise Fragile X Syndrome (FRAXA); Fragile XE Mental Retardation (FRAXE); Friedreich Ataxia (FRDA); Myotonic Dystrophy (DM); and Spinocerebellar Ataxias (SCA types 8, and 12).

[1458] The proteins associated with trinucleotide repeat expansion disorders can be selected based on an experimental association of the protein associated with a trinucleotide repeat expansion disorder to a trinucleotide repeat expansion disorder. For example, the production rate or circulating concentration of a protein associated with a trinucleotide repeat expansion disorder may be elevated or depressed in a population having a trinucleotide repeat expansion disorder relative to a population lacking the trinucleotide repeat expansion disorder. Differences in protein levels may be assessed using proteomic techniques including but not limited to Western blot, immunohistochemical staining, enzyme linked immunosorbent assay (ELISA), and mass spectrometry. Alternatively, the proteins associated with trinucleotide repeat expansion disorders may be identified by obtaining gene expression profiles of the genes encoding the proteins using genomic techniques including but not limited to DNA microarray analysis, serial analysis of gene expression (SAGE), and quantitative real-time polymerase chain reaction (Q-PCR).

[1459] Non-limiting examples of proteins associated with trinucleotide repeat expansion disorders which can be corrected by multi-flap prime editing include AR (androgen receptor), FMR1 (fragile X mental retardation 1), HTT (huntingtin), DMPK (dystrophia myotonica-protein kinase), FXN (frataxin), ATXN2 (ataxin 2), ATN1 (atrophin 1), FEN1 (flap structure-specific endonuclease 1), TNRC6A (trinucleotide repeat containing 6A), PABPN1 (poly(A) binding protein, nuclear 1), JPH3 (junctophilin 3), MED15 (mediator complex subunit 15), ATXN1 (ataxin 1), ATXN3 (ataxin 3), TBP (TATA box binding protein), CACNA1A (calcium channel, voltage-dependent, P/Q type, alpha 1A subunit), ATXN8OS (ATXN8 opposite strand (non-protein coding)), PPP2R2B (protein phosphatase 2, regulatory subunit B, beta), ATXN7 (ataxin 7), TNRC6B (trinucleotide repeat containing 6B), TNRC6C (trinucleotide repeat containing 6C), CELF3 (CUGBP, Elav-like family member 3), MAB21L1 (mab-21-like 1 (C. elegans)), MSH2 (mutS homolog 2, colon cancer, nonpolyposis type 1 (E. coli)), TMEM185A (transmembrane protein 185A), SIX5 (SIX homeobox 5), CNPY3 (canopy 3 homolog (zebrafish)), FRAXE (fragile site, folic acid type, rare, fra(X)(q28) E), GNB2 (guanine nucleotide binding protein (G protein), beta polypeptide 2), RPL14 (ribosomal protein L14), ATXN8 (ataxin 8), INSR (insulin receptor), TTR (transthyretin), EP400 (E1A binding protein p400), GIGYF2 (GRB10 interacting GYF protein 2), OGG1 (8-oxoguanine DNA glycosylase), STC1 (stanniocalcin 1), CNDP1 (carnosine dipeptidase 1 (metallopeptidase M20 family)), C10orf2 (chromosome 10 open reading frame 2), MAML3 mastermind-like 3 (Drosophila), DKC1 (dyskeratosis congenita 1, dyskerin), PAXIP1 (PAX interacting (with transcription-activation domain) protein 1), CASK (calcium/calmodulin-dependent serine protein kinase (MAGUK family)), MAPT (microtubule-associated protein tau), SP1 (Spl transcription factor), POLG (polymerase (DNA directed), gamma), AFF2 (AF4/FMR2 family, member 2), THB S1 (thrombospondin 1), TP53 (tumor protein p53), ESR1 (estrogen receptor 1), CGGBP1 (CGG triplet repeat binding protein 1), ABT1 (activator of basal transcription 1), KLK3 (kallikrein-related peptidase 3), PRNP (prion protein), JUN (jun oncogene), KCNN3 (potassium intermediate/small conductance calcium-activated channel, subfamily N, member 3), BAX (BCL2-associated X protein), FRAXA (fragile site, folic acid type, rare, fra(X)(q27.3) A (macroorchidism, mental retardation)), KBTBD10 (kelch repeat and BTB (POZ) domain containing 10), MBNL1 (muscleblind-like (Drosophila)), RAD51 (RAD51 homolog (RecA homolog, E. coli) (S. cerevisiae)), NCOA3 (nuclear receptor coactivator 3), ERDA1 (expanded repeat domain, CAG/CTG 1), TSC1 (tuberous sclerosis 1), COMP (cartilage oligomeric matrix protein), GCLC (glutamate-cysteine ligase, catalytic subunit), RRAD (Ras-related associated with diabetes), MSH3 (mutS homolog 3 (E. coli)), DRD2 (dopamine receptor D2), CD44 (CD44 molecule (Indian blood group)), CTCF (CCCTC-binding factor (zinc finger protein)), CCND1 (cyclin Dl), CLSPN (claspin homolog (Xenopus laevis)), MEF2A (myocyte enhancer factor 2A), PTPRU (protein tyrosine phosphatase, receptor type, U), GAPDH (glyceraldehyde-3-phosphate dehydrogenase), TRIM22 (tripartite motif-containing 22), WT1 (Wilms tumor 1), AHR (aryl hydrocarbon receptor), GPX1 (glutathione peroxidase 1), TPMT (thiopurine S-methyltransferase), NDP (Norrie disease (pseudoglioma)), ARX (aristaless related homeobox), MUS81 (MUS81 endonuclease homolog (S. cerevisiae)), TYR (tyrosinase (oculocutaneous albinism IA)), EGR1 (early growth response 1), UNG (uracil-DNA glycosylase), NUMBL (numb homolog (Drosophila)-like), FABP2 (fatty acid binding protein 2, intestinal), EN2 (engrailed homeobox 2), CRYGC (crystallin, gamma C), SRP14 (signal recognition particle 14 kDa (homologous Alu RNA binding protein)), CRYGB (crystallin, gamma B), PDCD1 (programmed cell death 1), HOXA1 (homeobox A1), ATXN2L (ataxin 2-like), PMS2 (PMS2 postmeiotic segregation increased 2 (S. cerevisiae)), GLA (galactosidase, alpha), CBL (Cas-Br-M (murine) ecotropic retroviral transforming sequence), FTH1 (ferritin, heavy polypeptide 1), IL12RB2 (interleukin 12 receptor, beta 2), OTX2 (orthodenticle homeobox 2), HOXA5 (homeobox A5), POLG2 (polymerase (DNA directed), gamma 2, accessory subunit), DLX2 (distal-less homeobox 2), SIRPA (signal-regulatory protein alpha), OTX1 (orthodenticle homeobox 1), AHRR (aryl-hydrocarbon receptor repressor), MANF (mesencephalic astrocyte-derived neurotrophic factor), TMEM158 (transmembrane protein 158 (gene/pseudogene)), and ENSG00000078687.

[1460] In a particular aspect, the instant disclosure provides TPRT-based methods for the treatment of a subject diagnosed with an expansion repeat disorder (also known as a repeat expansion disorder or a trinucleotide repeat disorder). Expansion repeat disorders occur when microsatellite repeats expand beyond a threshold length. Currently, at least 30 genetic diseases are believed to be caused by repeat expansions. Scientific understanding of this diverse group of disorders came to lights in the early 1990's with the discovery that trinucleotide repeats underlie several major inherited conditions, including Fragile X, Spinal and Bulbar Muscular Atrophy, Myotonic Dystrophy, and Huntington's disease (Nelson et al, “The unstable repeats—three evolving faces of neurological disease,” Neuron, Mar. 6, 2013, Vol.77; 825-843, which is incorporated herein by reference), as well as Haw River Syndrome, Jacobsen Syndrome, Dentatorubral-pallidoluysian atrophy (DRPLA), Machado-Joseph disease, Synpolydactyly (SPD II), Hand-foot genital syndrome (HFGS), Cleidocranial dysplasia (CCD), Holoprosencephaly disorder (HPE), Congenital central hypventilation syndrome (CCHS), ARX-nonsyndromic X-linked mental retardation (XLMR), and Oculopharyngeal muscular dystrophy (OPMD) (see. Microsatellite repeat instability was found to be a hallmark of these conditions, as was anticipation—the phenomenon in which repeat expansion can occur with each successive generation, which leads to a more severe phenotype and earlier age of onset in the offspring. Repeat expansions are believed to cause diseases via several different mechanisms. Namely, expansions may interfere with cellular functioning at the level of the gene, the mRNA transcript, and/or the encoded protein. In some conditions, mutations act via a loss-of-function mechanism by silencing repeat-containing genes. In others, disease results from gain-of-function mechanisms, whereby either the mRNA transcript or protein takes on new, aberrant functions.

[1461] In one embodiment, a method of treating a trinucleotide repeat disorder is depicted in FIG. 23. In general, the approach involves using TPRT genome editing (i.e., multi-flap prime editing) in combination with an extended gRNA that comprises a region that encodes a desired and healthy replacement trinucleotide repeat sequence that is intended to replace the endogenous diseased trinucleotide repeat sequence through the mechanism of the prime editing process. A schematic of an exemplary gRNA design for contracting trinucleotide repeat sequences and trinucleotide repeat contraction with TPRT genome editing (i.e., multi-flap prime editing) is shown in FIG. 23.

### Prion Disease

[1462] Multi-flap prime editing can also be used to prevent or halt the progression of prion disease through the installation of one or more protective mutations into prion proteins (PRNP) which become misfolded during the course of disease. Prion diseases or transmissible spongiform encephalopathies (TSEs) are a family of rare progressive neurodegenerative disorders that affect both humans and animals They are distinguished by long incubation periods, characteristic spongiform changes associated with neuronal loss, and a failure to induce inflammatory response.

[1463] In humans, prion disease includes Creutzfeldt-Jakob Disease (CJD), Variant Creutzfeldt-Jakob Disease (vCJD), Gerstmann-Straussler-Scheinker Syndrome, Fatal Familial Insomnia, and Kuru. In animals, prion disease includes Bovine Spongiform Encephalopathy (BSE or “mad cow disease”), Chronic Wasting Disease (CWD), Scrapie, Transmissible Mink Encephalopathy, Feline Spongiform Encephalopathy, and Ungulate Spongiform Encephalopathy. Multi-flap prime editing may be used to install protective point mutations into a prion protein in order to prevent or halt the progression of any one of these prion diseases.

[1464] Classic CJD is a human prion disease. It is a neurodegenerative disorder with characteristic clinical and diagnostic features. This disease is rapidly progressive and always fatal. Infection with this disease leads to death usually within 1 year of onset of illness. CJD is a rapidly progressive, invariably fatal neurodegenerative disorder believed to be caused by an abnormal isoform of a cellular glycoprotein known as the prion protein. CJD occurs worldwide and the estimated annual incidence in many countries, including the United States, has been reported to be about one case per million population. The vast majority of CJD patients usually die within 1 year of illness onset. CJD is classified as a transmissible spongiform encephalopathy (TSE) along with other prion diseases that occur in humans and animals In about 85% of patients, CJD occurs as a sporadic disease with no recognizable pattern of transmission. A smaller proportion of patients (5 to 15%) develop CJD because of inherited mutations of the prion protein gene. These inherited forms include Gerstmann-Straussler-Scheinker syndrome and fatal familial insomnia. No treatment is currently known for CJD.

[1465] Variant Creutzfeldt-Jakob disease (vCJD) is a prion disease that was first described in 1996 in the United Kingdom. There is now strong scientific evidence that the agent responsible for the outbreak of prion disease in cows, bovine spongiform encephalopathy (BSE or ‘mad cow’ disease), is the same agent responsible for the outbreak of vCJD in humans. Variant CJD (vCJD) is not the same disease as classic CJD (often simply called CJD). It has different clinical and pathologic characteristics from classic CJD. Each disease also has a particular genetic profile of the prion protein gene. Both disorders are invariably fatal brain diseases with unusually long incubation periods measured in years, and are caused by an unconventional transmissible agent called a prion. No treatment is currently known for vCJD.

[1466] BSE (bovine spongiform encephalopathy or “mad cow disease”) is a progressive neurological disorder of cattle that results from infection by an unusual transmissible agent called a prion. The nature of the transmissible agent is not well understood. Currently, the most accepted theory is that the agent is a modified form of a normal protein known as prion protein. For reasons that are not yet understood, the normal prion protein changes into a pathogenic (harmful) form that then damages the central nervous system of cattle. There is increasing evidence that there are different strains of BSE: the typical or classic BSE strain responsible for the outbreak in the United Kingdom and two atypical strains (H and L strains). No treatment is currently known for BSE.

[1467] Chronic wasting disease (CWD) is a prion disease that affects deer, elk, reindeer, sika deer and moose. It has been found in some areas of North America, including Canada and the United States, Norway and South Korea. It may take over a year before an infected animal develops symptoms, which can include drastic weight loss (wasting), stumbling, listlessness and other neurologic symptoms. CWD can affect animals of all ages and some infected animals may die without ever developing the disease. CWD is fatal to animals and there are no treatments or vaccines.

[1468] The causative agents of TSEs are believed to be prions. The term “prions” refers to abnormal, pathogenic agents that are transmissible and are able to induce abnormal folding of specific normal cellular proteins called prion proteins that are found most abundantly in the brain. The functions of these normal prion proteins are still not completely understood. The abnormal folding of the prion proteins leads to brain damage and the characteristic signs and symptoms of the disease. Prion diseases are usually rapidly progressive and always fatal.

[1469] As used herein, the term “prion” shall mean an infectious particle known to cause diseases (spongiform encephalopathies) in humans and animals The term “prion” is a contraction of the words “protein” and “infection” and the particles are comprised largely if not exclusively of PRNP^{Sc} molecules encoded by a PRNP gene which expresses PRNP^{C} which changes conformation to become PRNP^{Sc}. Prions are distinct from bacteria, viruses and viroids. Known prions include those which infect animals to cause scrapie, a transmissible, degenerative disease of the nervous system of sheep and goats as well as bovine spongiform encephalopathies (B SE) or mad cow disease and feline spongiform encephalopathies of cats. Four prion diseases, as discussed above, known to affect humans are (1) kuru, (2) Creutzfeldt-Jakob Disease (CJD), (3) Gerstmann-Strassler-Scheinker Disease (GSS), and (4) fatal familial insomnia (FFI). As used herein prion includes all forms of prions causing all or any of these diseases or others in any animals used--and in particular in humans and in domesticated farm animals.

[1470] In general, and without wishing to be bound by theory, prior diseases are caused by misfolding of prion proteins. Such diseases—often called deposition diseases—the misfolding of the prion proteins can be accounted for as follows. If A is the normally synthesized gene product that carries out an intended physiologic role in a monomeric or oligomeric state, A* is a conformationally activated form of A that is competent to undergo a dramatic conformational change, B is the conformationally altered state that prefers multimeric assemblies (i.e., the misfolded form which forms depositions) and Bₙ is the multimeric material that is pathogenic and relatively difficult to recycle. For the prion diseases, PRNP^{C} and PRNP^{Sc} correspond to states A and Bₙ where A is largely helical and monomeric and Bₙ is β-rich and multimeric.

[1471] It is known that certain mutations in prion proteins can be associated with increased risk of prior disease. Conversely, certain mutations in prion proteins can be protective in nature. See Bagynszky et al., “Characterization of mutations in PRNP (prion) gene and their possible roles in neurodegenerative diseases,” Neuropsychiatr Dis Treat., 2018; 14: 2067-2085, the contents of which are incorporated herein by reference.

[1472] PRNP (NCBI RefSeq No. NP_000302.1 (SEQ ID NO: 291))—the human prion protein—is encoded by a 16 kb long gene, located on chromosome 20 (4686151-4701588). It contains two exons, and the exon 2 carries the open reading frame which encodes the 253 amino acid (AA) long PrP protein. Exon 1 is a noncoding exon, which may serve as transcriptional initiation site. The post-translational modifications result in the removal of the first 22 AA N-terminal fragment (NTF) and the last 23 AA C-terminal fragment (CTF). The NTF is cleaved after PrP transport to the endoplasmic reticulum (ER), while the CTF (glycosylphosphatidylinositol [GPI] signal peptide [GPI-SP]) is cleaved by the GPI anchor. GPI anchor could be involved in PrP protein transport. It may also play a role of attachment of prion protein into the outer surface of cell membrane. Normal PrP is composed of a long N-terminal loop (which contains the octapeptide repeat region), two short β sheets, three a helices, and a C-terminal region (which contains the GPI anchor). Cleavage of PrP results in a 208 AA long glyocoprotein, anchored in the cell membrane.

[1473] The 253 amino acid sequence of PRNP (NP_000302.1) is as follows:

(SEQ ID NO: 291)
MANLGCWMLVLFVATWSDLGLCKKRPKPGGWNTGGSRYPGQGSPGGNRYP
PQGGGGWGQPHGGGWGQPHGGGWGQPHGGGWGQPHGGGWGQGGGTHSQWN
KPSKPKTNMKHMAGAAAAGAVVGGLGGYMLGSAMSRPIIHFGSDYEDRYY
RENMHRYPNQVYYRPMDEYSNQNNFVHDCVNITIKQHTVTTTTKGENFTE
TDVKMMERVVEQMCITQYERESQAYYQRGSSMVLFSSPPVILLISFLIFL
IVG.

[1474] The 253 amino acid sequence of PRNP (NP_000302.1) is encoded by the following nucleotide sequence (NCBI Ref. Seq No. NM_000311.5, “homo sapiens prion protein (PRNP), transcript variant 1, mRNA), is as follows:

(SEQ ID NO: 292)
GCGAACCTTGGCTGCTGGATGCTGGTTCTCTTTGTGGCCACATGGAGTGA
CCTGGGCCTCTGCAAGAAGCGCCCGAAGCCTGGAGGATGGAACACTGGGG
GCAGCCGATACCCGGGGCAGGGCAGCCCTGGAGGCAACCGCTACCCACCT
CAGGGCGGTGGTGGCTGGGGGCAGCCTCATGGTGGTGGCTGGGGGCAGCC
TCATGGTGGTGGCTGGGGGCAGCCCCATGGTGGTGGCTGGGGACAGCCTC
ATGGTGGTGGCTGGGGTCAAGGAGGTGGCACCCACAGTCAGTGGAACAAG
CCGAGTAAGCCAAAAACCAACATGAAGCACATGGCTGGTGCTGCAGCAGC
TGGGGCAGTGGTGGGGGGCCTTGGCGGCTACATGCTGGGAAGTGCCATGA
GCAGGCCCATCATACATTTCGGCAGTGACTATGAGGACCGTTACTATCGT
GAAAACATGCACCGTTACCCCAACCAAGTGTACTACAGGCCCATGGATGA
GTACAGCAACCAGAACAACTTTGTGCACGACTGCGTCAATATCACAATCA
AGCAGCACACGGTCACCACAACCACCAAGGGGGAGAACTTCACCGAGACC
GACGTTAAGATGATGGAGCGCGTGGTTGAGCAGATGTGTATCACCCAGTA
CGAGAGGGAATCTCAGGCCTATTACCAGAGAGGATCGAGCATGGTCCTCT
TCTCCTCTCCACCTGTGATCCTCCTGATCTCTTTCCTCATCTTCCTGATA
GTGGGATGAGGAAGGTCTTCCTGTTTTCACCATCTTTCTAATCTTTTTCC
AGCTTGAGGGAGGCGGTATCCACCTGCAGCCCTTTTAGTGGTGGTGTCTC
ACTCTTTCTTCTCTCTTTGTCCCGGATAGGCTAATCAATACCCTTGGCAC
TGATGGGCACTGGAAAACATAGAGTAGACCTGAGATGCTGGTCAAGCCCC
CTTTGATTGAGTTCATCATGAGCCGTTGCTAATGCCAGGCCAGTAAAAGT
ATAACAGCAAATAACCATTGGTTAATCTGGACTTATTTTTGGACTTAGTG
CAACAGGTTGAGGCTAAAACAAATCTCAGAACAGTCTGAAATACCTTTGC
CTGGATACCTCTGGCTCCTTCAGCAGCTAGAGCTCAGTATACTAATGCCC
TATCTTAGTAGAGATTTCATAGCTATTTAGAGATATTTTCCATTTTAAGA
AAACCCGACAACATTTCTGCCAGGTTTGTTAGGAGGCCACATGATACTTA
TTCAAAAAAATCCTAGAGATTCTTAGCTCTTGGGATGCAGGCTCAGCCCG
CTGGAGCATGAGCTCTGTGTGTACCGAGAACTGGGGTGATGTTTTACTTT
TCACAGTATGGGCTACACAGCAGCTGTTCAACAAGAGTAAATATTGTCAC
AACACTGAACCTCTGGCTAGAGGACATATTCACAGTGAACATAACTGTAA
CATATATGAAAGGCTTCTGGGACTTGAAATCAAATGTTTGGGAATGGTGC
CCTTGGAGGCAACCTCCCATTTTAGATGTTTAAAGGACCCTATATGTGGC
ATTCCTTTCTTTAAACTATAGGTAATTAAGGCAGCTGAAAAGTAAATTGC
CTTCTAGACACTGAAGGCAAATCTCCTTTGTCCATTTACCTGGAAACCAG
AATGATTTTGACATACAGGAGAGCTGCAGTTGTGAAAGCACCATCATCAT
AGAGGATGATGTAATTAAAAAATGGTCAGTGTGCAAAGAAAAGAACTGCT
TGCATTTCTTTATTTCTGTCTCATAATTGTCAAAAACCAGAATTAGGTCA
AGTTCATAGTTTCTGTAATTGGCTTTTGAATCAAAGAATAGGGAGACAAT
CTAAAAAATATCTTAGGTTGGAGATGACAGAAATATGATTGATTTGAAGT
GGAAAAAGAAATTCTGTTAATGTTAATTAAAGTAAAATTATTCCCTGAAT
TGTTTGATATTGTCACCTAGCAGATATGTATTACTTTTCTGCAATGTTAT
TATTGGCTTGCACTTTGTGAGTATTCTATGTAAAAATATATATGTATATA
AAATATATATTGCATAGGACAGACTTAGGAGTTTTGTTTAGAGCAGTTAA
CATCTGAAGTGTCTAATGCATTAACTTTTGTAAGGTACTGAATACTTAAT
ATGTGGGAAACCCTTTTGCGTGGTCCTTAGGCTTACAATGTGCACTGAAT
CGTTTCATGTAAGAATCCAAAGTGGACACCATTAACAGGTCTTTGAAATA
TGCATGTACTTTATATTTTCTATATTTGTAACTTTGCATGTTCTTGTTTT
GTTATATAAAAAAATTGTAAATGTTTAATATCTGACTGAAATTAAACGAG
CGAAGATGAGCACCA

[1475] Mutation sites relative to PRNP (NP_000302.1) which are linked to CJD and FFI are reported are as follows. These mutations can be removed or installed using the multi-flap prime editors disclosed herein.

| | AMINO ACID SEQUENCE OF MUTANT PRNP LINKED TO CJD PRION DISEASE |
|---|---|
| | (SEE TABLE 1 OF BAGYNSZKY ET AL., 2018) |
| MUTATION | (RELATIVE TO SEQ ID NO: 291 OF PRNP NP_000302.1) |
| D178N | MANLGCWMLVLFVATWSDLGLCKKRPKPGGWNTGGSRYPGQGSPGGNRYPPQG |
| | GGGWGQPHGGGWGQPHGGGWGQPHGGGWGQPHGGGWGQGGGTHSQWNKPS |
| | KPKTNMKHMAGAAAAGAVVGGLGGYMLGSAMSRPIIHFGSDYEDRYYRENMH |
| | RYPNQVYYRPMDEYSNQNNFVHNCVNITIKQHTVTTTTKGENFTETDVKMMERV |
| | VEQMCITQYERESQAYYQRGSSMVLFSSPPV (SEQ ID NO: 3940) |
| T188K | MANLGCWMLVLFVATWSDLGLCKKRPKPGGWNTGGSRYPGQGSPGGNRYPPQG |
| | GGGWGQPHGGGWGQPHGGGWGQPHGGGWGQPHGGGWGQGGGTHSQWNKPS |
| | KPKTNMKHMAGAAAAGAVVGGLGGYMLGSAMSRPIIHFGSDYEDRYYRENMH |
| | RYPNQVYYRPMDEYSNQNNFVHDCVNITIKQHKVTTTTKGENFTETDVKMMER |
| | VVEQMCITQYERESQAYYQRGSSMVLFSSPPV (SEQ ID NO: 3941) |
| E196K | MANLGCWMLVLFVATWSDLGLCKKRPKPGGWNTGGSRYPGQGSPGGNRYPPQG |
| | GGGWGQPHGGGWGQPHGGGWGQPHGGGWGQPHGGGWGQGGGTHSQWNKPS |
| | KPKTNMKHMAGAAAAGAVVGGLGGYMLGSAMSRPIIHFGSDYEDRYYRENMH |
| | RYPNQVYYRPMDEYSNQNNFVHDCVNITIKQHTVTTTTKGKNFTETDVKMMER |
| | VVEQMCITQYERESQAYYQRGSSMVLFSSPPV (SEQ ID NO: 3942) |
| E196A | MANLGCWMLVLFVATWSDLGLCKKRPKPGGWNTGGSRYPGQGSPGGNRYPPQG |
| | GGGWGQPHGGGWGQPHGGGWGQPHGGGWGQPHGGGWGQGGGTHSQWNKPS |
| | KPKTNMKHMAGAAAAGAVVGGLGGYMLGSAMSRPIIHFGSDYEDRYYRENMH |
| | RYPNQVYYRPMDEYSNQNNFVHDCVNITIKQHTVTTTTKGANFTETDVKMMER |
| | VVEQMCITQYERESQAYYQRGSSMVLFSSPPV (SEQ ID NO: 296) |
| E200K | MANLGCWMLVLFVATWSDLGLCKKRPKPGGWNTGGSRYPGQGSPGGNRYPPQG |
| | GGGWGQPHGGGWGQPHGGGWGQPHGGGWGQPHGGGWGQGGGTHSQWNKPS |
| | KPKTNMKHMAGAAAAGAVVGGLGGYMLGSAMSRPIIHFGSDYEDRYYRENMH |
| | RYPNQVYYRPMDEYSNQNNFVHDCVNITIKQHTVTTTTKGENFTKTDVKMMER |
| | VVEQMCITQYERESQAYYQRGSSMVLFSSPPV (SEQ ID NO: 3943) |
| E200G | MANLGCWMLVLFVATWSDLGLCKKRPKPGGWNTGGSRYPGQGSPGGNRYPPQG |
| | GGGWGQPHGGGWGQPHGGGWGQPHGGGWGQPHGGGWGQGGGTHSQWNKPS |
| | KPKTNMKHMAGAAAAGAVVGGLGGYMLGSAMSRPIIHFGSDYEDRYYRENMH |
| | RYPNQVYYRPMDEYSNQNNFVHDCVNITIKQHTVTTTTKGENFTGTDVKMMER |
| | VVEQMCITQYERESQAYYQRGSSMVLFSSPPV (SEQ ID NO: 298) |
| V203I | MANLGCWMLVLFVATWSDLGLCKKRPKPGGWNTGGSRYPGQGSPGGNRYPPQG |
| | GGGWGQPHGGGWGQPHGGGWGQPHGGGWGQPHGGGWGQGGGTHSQWNKPS |
| | KPKTNMKHMAGAAAAGAVVGGLGGYMLGSAMSRPIIHFGSDYEDRYYRENMH |
| | RYPNQVYYRPMDEYSNQNNFVHDCVNITIKQHTVTTTTKGENFTETDIKMMERV |
| | VEQMCITQYERESQAYYQRGSSMVLFSSPPV (SEQ ID NO: 3944) |
| R208H | MANLGCWMLVLFVATWSDLGLCKKRPKPGGWNTGGSRYPGQGSPGGNRYPPQG |
| | GGGWGQPHGGGWGQPHGGGWGQPHGGGWGQPHGGGWGQGGGTHSQWNKPS |
| | KPKTNMKHMAGAAAAGAVVGGLGGYMLGSAMSRPIIHFGSDYEDRYYRENMH |
| | RYPNQVYYRPMDEYSNQNNFVHDCVNITIKQHTVTTTTKGENFTETDVKMMEH |
| | VVEQMCITQYERESQAYYQRGSSMVLFSSPPV(SEQ ID NO: 3945) |
| V210I | MANLGCWMLVLFVATWSDLGLCKKRPKPGGWNTGGSRYPGQGSPGGNRYPPQG |
| | GGGWGQPHGGGWGQPHGGGWGQPHGGGWGQPHGGGWGQGGGTHSQWNKPS |
| | KPKTNMKHMAGAAAAGAVVGGLGGYMLGSAMSRPIIHFGSDYEDRYYRENMH |
| | RYPNQVYYRPMDEYSNQNNFVHDCVNITIKQHTVTTTTKGENFTETDVKMMERV |
| | IEQMCITQYERESQAYYQRGSSMVLFSSPPV (SEQ ID NO: 3946) |
| E211Q | MANLGCWMLVLFVATWSDLGLCKKRPKPGGWNTGGSRYPGQGSPGGNRYPPQG |
| | GGGWGQPHGGGWGQPHGGGWGQPHGGGWGQPHGGGWGQGGGTHSQWNKPS |
| | KPKTNMKHMAGAAAAGAVVGGLGGYMLGSAMSRPIIHFGSDYEDRYYRENMH |
| | RYPNQVYYRPMDEYSNQNNFVHDCVNITIKQHTVTTTTKGENFTETDVKMMERV |
| | VQQMCITQYERESQAYYQRGSSMVLFSSPPV (SEQ ID NO: 3947) |
| M232R | MANLGCWMLVLFVATWSDLGLCKKRPKPGGWNTGGSRYPGQGSPGGNRYPPQG |
| | GGGWGQPHGGGWGQPHGGGWGQPHGGGWGQPHGGGWGQGGGTHSQWNKPS |
| | KPKTNMKHMAGAAAAGAVVGGLGGYMLGSAMSRPIIHFGSDYEDRYYRENMH |
| | RYPNQVYYRPMDEYSNQNNFVHDCVNITIKQHTVTTTTKGENFTETDVKMMERV |
| | VEQMCITQYERESQAYYQRGSSRVLFSSPPV (SEQ ID NO: 3948) |

[1476] Mutation sites relative to PRNP (NP_000302.1) (SEQ ID NO: 291) which are linked to GSS are reported, as follows:

| | AMINO ACID SEQUENCE OF MUTANT PRNP LINKED TO GSS PRION DISEASE |
|---|---|
| | (SEE TABLE 2 OF BAGYNSZKY ET AL., 2018) |
| MUTATION | (RELATIVE TO SEQ ID NO: 291 OF PRNP NP_000302.1) |
| P102L | MANLGCWMLVLFVATWSDLGLCKKRPKPGGWNTGGSRYPGQGSPGGNRYPPQG |
| | GGGWGQPHGGGWGQPHGGGWGQPHGGGWGQPHGGGWGQGGGTHSQWNKLS |
| | KPKTNMKHMAGAAAAGAVVGGLGGYMLGSAMSRPIIHFGSDYEDRYYRENMH |
| | RYPNQVYYRPMDEYSNQNNFVHDCVNITIKQHTVTTTTKGENFTETDVKMMERV |
| | VEQMCITQYERESQAYYQRGSSMVLFSSPPV (SEQ ID NO: 3949) |
| P105L | MANLGCWMLVLFVATWSDLGLCKKRPKPGGWNTGGSRYPGQGSPGGNRYPPQG |
| | GGGWGQPHGGGWGQPHGGGWGQPHGGGWGQPHGGGWGQGGGTHSQWNKPS |
| | KLKTNMKHMAGAAAAGAVVGGLGGYMLGSAMSRPIIHFGSDYEDRYYRENMH |
| | RYPNQVYYRPMDEYSNQNNFVHDCVNITIKQHTVTTTTKGENFTETDVKMMERV |
| | VEQMCITQYERESQAYYQRGSSMVLFSSPPV (SEQ ID NO: 3950) |
| A117V | MANLGCWMLVLFVATWSDLGLCKKRPKPGGWNTGGSRYPGQGSPGGNRYPPQG |
| | GGGWGQPHGGGWGQPHGGGWGQPHGGGWGQPHGGGWGQGGGTHSQWNKPS |
| | KPKTNMKHMAGAAVAGAVVGGLGGYMLGSAMSRPIIHFGSDYEDRYYRENMHR |
| | YPNQVYYRPMDEYSNQNNFVHDCVNITIKQHTVTTTTKGENFTETDVKMMERV |
| | VEQMCITQYERESQAYYQRGSSMVLFSSPPV (SEQ ID NO: 3951) |
| G131V | MANLGCWMLVLFVATWSDLGLCKKRPKPGGWNTGGSRYPGQGSPGGNRYPPQG |
| | GGGWGQPHGGGWGQPHGGGWGQPHGGGWGQPHGGGWGQGGGTHSQWNKPS |
| | KPKTNMKHMAGAAAAGAVVGGLGGYMLVSAMSRPIIHFGSDYEDRYYRENMH |
| | RYPNQVYYRPMDEYSNQNNFVHDCVNITIKQHTVTTTTKGENFTETDVKMMERV |
| | VEQMCITQYERESQAYYQRGSSMVLFSSPPV (SEQ ID NO: 3952) |
| V176G | MANLGCWMLVLFVATWSDLGLCKKRPKPGGWNTGGSRYPGQGSPGGNRYPPQG |
| | GGGWGQPHGGGWGQPHGGGWGQPHGGGWGQPHGGGWGQGGGTHSQWNKPS |
| | KPKTNMKHMAGAAAAGAVVGGLGGYMLGSAMSRPIIHFGSDYEDRYYRENMH |
| | RYPNQVYYRPMDEYSNQNNFGHDCVNITIKQHTVTTTTKGENFTETDVKMMERV |
| | VEQMCITQYERESQAYYQRGSSMVLFSSPPV (SEQ ID NO: 3953) |
| H187R | MANLGCWMLVLFVATWSDLGLCKKRPKPGGWNTGGSRYPGQGSPGGNRYPPQG |
| | GGGWGQPHGGGWGQPHGGGWGQPHGGGWGQPHGGGWGQGGGTHSQWNKPS |
| | KPKTNMKHMAGAAAAGAVVGGLGGYMLGSAMSRPIIHFGSDYEDRYYRENMH |
| | RYPNQVYYRPMDEYSNQNNFVHDCVNITIKQRTVTTTTKGENFTETDVKMMERV |
| | VEQMCITQYERESQAYYQRGSSMVLFSSPPV (SEQ ID NO: 3954) |
| | MANLGCWMLVLFVATWSDLGLCKKRPKPGGWNTGGSRYPGQGSPGGNRYPPQG |
| | GGGWGQPHGGGWGQPHGGGWGQPHGGGWGQPHGGGWGQGGGTHSQWNKPS |
| | KPKTNMKHMAGAAAAGAVVGGLGGYMLGSAMSRPIIHFGSDYEDRYYRENMH |
| | RYPNQVYYRPMDEYSNQNNFVHDCVNITIKQHTVTTTTKGENFTETDVKMMERV |
| | VEQMCITQYERESQAYYQRGSSMVLFSSPPV (SEQ ID NO: 487) |
| F198S | MANLGCWMLVLFVATWSDLGLCKKRPKPGGWNTGGSRYPGQGSPGGNRYPPQG |
| | GGGWGQPHGGGWGQPHGGGWGQPHGGGWGQPHGGGWGQGGGTHSQWNKPS |
| | KPKTNMKHMAGAAAAGAVVGGLGGYMLGSAMSRPIIHFGSDYEDRYYRENMH |
| | RYPNQVYYRPMDEYSNQNNFVHDCVNITIKQHTVTTTTKGENSTETDVKMMERV |
| | VEQMCITQYERESQAYYQRGSSMVLFSSPPV (SEQ ID NO: 3955) |
| D202N | MANLGCWMLVLFVATWSDLGLCKKRPKPGGWNTGGSRYPGQGSPGGNRYPPQG |
| | GGGWGQPHGGGWGQPHGGGWGQPHGGGWGQPHGGGWGQGGGTHSQWNKPS |
| | KPKTNMKHMAGAAAAGAVVGGLGGYMLGSAMSRPIIHFGSDYEDRYYRENMH |
| | RYPNQVYYRPMDEYSNQNNFVHDCVNITIKQHTVTTTTKGENFTETNVKMMERV |
| | VEQMCITQYERESQAYYQRGSSMVLFSSPPV (SEQ ID NO: 3956) |
| Q212P | MANLGCWMLVLFVATWSDLGLCKKRPKPGGWNTGGSRYPGQGSPGGNRYPPQG |
| | GGGWGQPHGGGWGQPHGGGWGQPHGGGWGQPHGGGWGQGGGTHSQWNKPS |
| | KPKTNMKHMAGAAAAGAVVGGLGGYMLGSAMSRPIIHFGSDYEDRYYRENMH |
| | RYPNQVYYRPMDEYSNQNNFVHDCVNITIKQHTVTTTTKGENFTETDVKMMERV |
| | VEPMCITQYERESQAYYQRGSSMVLFSSPPV (SEQ ID NO: 3957) |
| Q217R | MANLGCWMLVLFVATWSDLGLCKKRPKPGGWNTGGSRYPGQGSPGGNRYPPQG |
| | GGGWGQPHGGGWGQPHGGGWGQPHGGGWGQPHGGGWGQGGGTHSQWNKPS |
| | KPKTNMKHMAGAAAAGAVVGGLGGYMLGSAMSRPIIHFGSDYEDRYYRENMH |
| | RYPNQVYYRPMDEYSNQNNFVHDCVNITIKQHTVTTTTKGENFTETDVKMMERV |
| | VEQMCITRYERESQAYYQRGSSMVLFSSPPV (SEQ ID NO: 3958) |
| M232T | MANLGCWMLVLFVATWSDLGLCKKRPKPGGWNTGGSRYPGQGSPGGNRYPPQG |
| | GGGWGQPHGGGWGQPHGGGWGQPHGGGWGQPHGGGWGQGGGTHSQWNKPS |
| | KPKTNMKHMAGAAAAGAVVGGLGGYMLGSAMSRPIIHFGSDYEDRYYRENMH |
| | RYPNQVYYRPMDEYSNQNNFVHDCVNITIKQHTVTTTTKGENFTETDVKMMERV |
| | VEQMCITQYERESQAYYQRGSSTVLFSSPPV (SEQ ID NO: 3959) |

[1477] Mutation sites relative to PRNP (NP_000302.1) (SEQ ID NO: 291) which are linked to a possible protective nature against prion disease, as follows:

| | AMINO ACID SEQUENCE OF MUTANT PRNP LINKED TO A PROTECTIVE |
|---|---|
| | NATURE AGAINST PRION DISEASE (SEE TABLE 4 OF BAGYNSZKY ET AL., |
| MUTATION | 2018) (RELATIVE TO SEQ ID NO: 291 OF PRNP NP_000302.1) |
| G127S | MANLGCWMLVLFVATWSDLGLCKKRPKPGGWNTGGSRYPGQGSPGGNRYPPQG |
| | GGGWGQPHGGGWGQPHGGGWGQPHGGGWGQPHGGGWGQGGGTHSQWNKPS |
| | KPKTNMKHMAGAAAAGAVVGGLGSYMLGSAMSRPIIHFGSDYEDRYYRENMHR |
| | YPNQVYYRPMDEYSNQNNFVHDCVNITIKQHTVTTTTKGENFTETDVKMMERV |
| | VEQMCITQYERESQAYYQRGSSMVLFSSPPV (SEQ ID NO: 3960) |
| G127V | MANLGCWMLVLFVATWSDLGLCKKRPKPGGWNTGGSRYPGQGSPGGNRYPPQG |
| | GGGWGQPHGGGWGQPHGGGWGQPHGGGWGQPHGGGWGQGGGTHSQWNKPS |
| | KPKTNMKHMAGAAAAGAVVGGLGVYMLGSAMSRPIIHFGSDYEDRYYRENMH |
| | RYPNQVYYRPMDEYSNQNNFVHDCVNITIKQHTVTTTTKGENFTETDVKMMERV |
| | VEQMCITQYERESQAYYQRGSSMVLFSSPPV (SEQ ID NO: 3961) |
| M129V | MANLGCWMLVLFVATWSDLGLCKKRPKPGGWNTGGSRYPGQGSPGGNRYPPQG |
| | GGGWGQPHGGGWGQPHGGGWGQPHGGGWGQPHGGGWGQGGGTHSQWNKPS |
| | KPKTNMKHMAGAAAAGAVVGGLGGYVLGSAMSRPIIHFGSDYEDRYYRENMHR |
| | YPNQVYYRPMDEYSNQNNFVHDCVNITIKQHTVTTTTKGENFTETDVKMMERV |
| | VEQMCITQYERESQAYYQRGSSMVLFSSPPV (SEQ ID NO: 3962) |
| D167G | MANLGCWMLVLFVATWSDLGLCKKRPKPGGWNTGGSRYPGQGSPGGNRYPPQG |
| | GGGWGQPHGGGWGQPHGGGWGQPHGGGWGQPHGGGWGQGGGTHSQWNKPS |
| | KPKTNMKHMAGAAAAGAVVGGLGGYMLGSAMSRPIIHFGSDYEDRYYRENMH |
| | RYPNQVYYRPMGEYSNQNNFVHDCVNITIKQHTVTTTTKGENFTETDVKMMERV |
| | VEQMCITQYERESQAYYQRGSSMVLFSSPPV (SEQ ID NO: 3963) |
| D167N | MANLGCWMLVLFVATWSDLGLCKKRPKPGGWNTGGSRYPGQGSPGGNRYPPQG |
| | GGGWGQPHGGGWGQPHGGGWGQPHGGGWGQPHGGGWGQGGGTHSQWNKPS |
| | KPKTNMKHMAGAAAAGAVVGGLGGYMLGSAMSRPIIHFGSDYEDRYYRENMH |
| | RYPNQVYYRPMNEYSNQNNFVHDCVNITIKQHTVTTTTKGENFTETDVKMMERV |
| | VEQMCITQYERESQAYYQRGSSMVLFSSPPV (SEQ ID NO: 3964) |
| N171S | MANLGCWMLVLFVATWSDLGLCKKRPKPGGWNTGGSRYPGQGSPGGNRYPPQG |
| | GGGWGQPHGGGWGQPHGGGWGQPHGGGWGQPHGGGWGQGGGTHSQWNKPS |
| | KPKTNMKHMAGAAAAGAVVGGLGGYMLGSAMSRPIIHFGSDYEDRYYRENMH |
| | RYPNQVYYRPMDEYSSQNNFVHDCVNITIKQHTVTTTTKGENFTETDVKMMERV |
| | VEQMCITQYERESQAYYQRGSSMVLFSSPPV (SEQ ID NO: 3965) |
| E219K | MANLGCWMLVLFVATWSDLGLCKKRPKPGGWNTGGSRYPGQGSPGGNRYPPQG |
| | GGGWGQPHGGGWGQPHGGGWGQPHGGGWGQPHGGGWGQGGGTHSQWNKPS |
| | KPKTNMKHMAGAAAAGAVVGGLGGYMLGSAMSRPIIHFGSDYEDRYYRENMH |
| | RYPNQVYYRPMDEYSNQNNFVHDCVNITIKQHTVTTTTKGENFTETDVKMMERV |
| | VEQMCITQYKRESQAYYQRGSSMVLFSSPPV (SEQ ID NO: 3966) |
| P238S | MANLGCWMLVLFVATWSDLGLCKKRPKPGGWNTGGSRYPGQGSPGGNRYPPQG |
| | GGGWGQPHGGGWGQPHGGGWGQPHGGGWGQPHGGGWGQGGGTHSQWNKPS |
| | KPKTNMKHMAGAAAAGAVVGGLGGYMLGSAMSRPIIHFGSDYEDRYYRENMH |
| | RYPNQVYYRPMDEYSNQNNFVHDCVNITIKQHTVTTTTKGENFTETDVKMMERV |
| | VEQMCITQYERESQAYYQRGSSMVLFSSSPV (SEQ ID NO: 3967) |

[1478] Thus, in various embodiments, multi-flap prime editing may be used to remove a mutation in PRNP that is linked to prion disease or install a mutation in PRNP that is considered to be protective against prion disease. For example, multi-flap prime editing may be use to remove or restore a D178N, V1801, T188K, E196K, E196A, E200K, E200G, V203I, R208H, V210I, E211Q, I215V, or M232R mutation in the PRNP protein (relative to PRNP of NP_000302.1) (SEQ ID NO: 291). In other embodiments, multi-flap prime editing may be use to remove or restore a P102L, P105L, A117V, G131V, V176G, H187R, F198S, D202N, Q212P, Q217R, or M232T mutation in the PRNP protein (relative to PRNP of NP_000302.1) (SEQ ID NO: 291). By removing or correcting for the presence of such mutations in PRNP using prime editing, the risk of prion disease may be reduced or eliminated.

[1479] In other embodiments, multi-flap prime editing may be used to install a protective mutation in PRNP that is linked to a protective effect against one or more prion diseases. For example, multi-flap prime editing may be used to install a G127S, G127V, M129V, D167G, D167N, N171S, E219K, or P238S protective mutation in PRNP (relative to PRNP of NP_000302.1) (SEQ ID NO: 291). In still other embodiments, the protective mutation may be any alternate amino acid installed at G127, G127, M129, D167, D167, N171, E219, or P238 in PRNP (relative to PRNP of NP_000302.1) (SEQ ID NO: 291).

[1480] In particular embodiments, multi-flap prime editing may be used to install a G127V protective mutation in PRNP, as illustrated in FIG. 27 and discussed in Example 5.

[1481] In another embodiment, prime editing may be used to install an E219K protective mutation in PRNP.

[1482] The PRNP protein and the protective mutation site are conserved in mammals, so in addition to treating human disease it could also be used to generate cows and sheep that are immune to prion disease, or even help cure wild populations of animals that are suffering from prion disease. Prime editing has already been used to achieve ˜25% installation of a naturally occurring protective allele in human cells, and previous mouse experiments indicate that this level of installation is sufficient to cause immunity from most prion diseases. This method is the first and potentially only current way to install this allele with such high efficiency in most cell types. Another possible strategy for treatment is to use prime editing or multi-flap prime editing to reduce or eliminate the expression of PRNP by installing an early stop codon in the gene.

[1483] Using the principles described herein for PEgRNA design, appropriate PEgRNAs may be designed for installing desired protective mutations, or for removing prion disease-associated mutations from PRNP. For example, the below list of PEgRNAs can be used to install the G127V protective allele and the E219K protective allele in human PRNP, as well as the G127V protective allele in PRNP of various animals

[10] Pharmaceutical compositions

[1484] Other aspects of the present disclosure relate to pharmaceutical compositions comprising any of the various components of the multi-flap prime editing system described herein (e.g., including, but not limited to, the napDNAbps, reverse transcriptases, fusion proteins (e.g., comprising napDNAbps and reverse transcriptases), extended guide RNAs, and complexes comprising fusion proteins and extended guide RNAs, as well as accessory elements, such as second strand nicking components and 5′ endogenous DNA flap removal endonucleases for helping to drive the multi-flap prime editing process towards the edited product formation).

[1485] The term “pharmaceutical composition”, as used herein, refers to a composition formulated for pharmaceutical use. In some embodiments, the pharmaceutical composition further comprises a pharmaceutically acceptable carrier. In some embodiments, the pharmaceutical composition comprises additional agents (e.g. for specific delivery, increasing half-life, or other therapeutic compounds).

[1486] As used here, the term “pharmaceutically-acceptable carrier” means a pharmaceutically-acceptable material, composition or vehicle, such as a liquid or solid filler, diluent, excipient, manufacturing aid (e.g., lubricant, talc magnesium, calcium or zinc stearate, or steric acid), or solvent encapsulating material, involved in carrying or transporting the compound from one site (e.g., the delivery site) of the body, to another site (e.g., organ, tissue or portion of the body). A pharmaceutically acceptable carrier is “acceptable” in the sense of being compatible with the other ingredients of the formulation and not injurious to the tissue of the subject (e.g., physiologically compatible, sterile, physiologic pH, etc.). Some examples of materials which can serve as pharmaceutically-acceptable carriers include: (1) sugars, such as lactose, glucose and sucrose; (2) starches, such as corn starch and potato starch; (3) cellulose, and its derivatives, such as sodium carboxymethyl cellulose, methylcellulose, ethyl cellulose, microcrystalline cellulose and cellulose acetate; (4) powdered tragacanth; (5) malt; (6) gelatin; (7) lubricating agents, such as magnesium stearate, sodium lauryl sulfate and talc; (8) excipients, such as cocoa butter and suppository waxes; (9) oils, such as peanut oil, cottonseed oil, safflower oil, sesame oil, olive oil, corn oil and soybean oil; (10) glycols, such as propylene glycol; (11) polyols, such as glycerin, sorbitol, mannitol and polyethylene glycol (PEG); (12) esters, such as ethyl oleate and ethyl laurate; (13) agar; (14) buffering agents, such as magnesium hydroxide and aluminum hydroxide; (15) alginic acid; (16) pyrogen-free water; (17) isotonic saline; (18) Ringer's solution; (19) ethyl alcohol; (20) pH buffered solutions; (21) polyesters, polycarbonates and/or polyanhydrides; (22) bulking agents, such as polypeptides and amino acids (23) serum component, such as serum albumin, HDL and LDL; (22) C2-C12 alcohols, such as ethanol; and (23) other non-toxic compatible substances employed in pharmaceutical formulations. Wetting agents, coloring agents, release agents, coating agents, sweetening agents, flavoring agents, perfuming agents, preservative and antioxidants can also be present in the formulation. The terms such as “excipient”, “carrier”, “pharmaceutically acceptable carrier” or the like are used interchangeably herein.

[1487] In some embodiments, the pharmaceutical composition is formulated for delivery to a subject, e.g., for gene editing. Suitable routes of administrating the pharmaceutical composition described herein include, without limitation: topical, subcutaneous, transdermal, intradermal, intralesional, intraarticular, intraperitoneal, intravesical, transmucosal, gingival, intradental, intracochlear, transtympanic, intraorgan, epidural, intrathecal, intramuscular, intravenous, intravascular, intraosseus, periocular, intratumoral, intracerebral, and intracerebroventricular administration.

[1488] In some embodiments, the pharmaceutical composition described herein is administered locally to a diseased site (e.g., tumor site). In some embodiments, the pharmaceutical composition described herein is administered to a subject by injection, by means of a catheter, by means of a suppository, or by means of an implant, the implant being of a porous, non-porous, or gelatinous material, including a membrane, such as a sialastic membrane, or a fiber.

[1489] In other embodiments, the pharmaceutical composition described herein is delivered in a controlled release system. In one embodiment, a pump may be used (see, e.g., Langer, 1990, Science 249:1527-1533; Sefton, 1989, CRC Crit. Ref. Biomed. Eng. 14:201; Buchwald et al., 1980, Surgery 88:507; Saudek et al., 1989, N. Engl. J. Med. 321:574). In another embodiment, polymeric materials can be used. (See, e.g., Medical Applications of Controlled Release (Langer and Wise eds., CRC Press, Boca Raton, Fla., 1974); Controlled Drug Bioavailability, Drug Product Design and Performance (Smolen and Ball eds., Wiley, New York, 1984); Ranger and Peppas, 1983, Macromol. Sci. Rev. Macromol. Chem. 23:61. See also Levy et al., 1985, Science 228:190; During et al., 1989, Ann. Neurol. 25:351; Howard et al., 1989, J. Neurosurg. 71:105). Other controlled release systems are discussed, for example, in Langer, supra.

[1490] In some embodiments, the pharmaceutical composition is formulated in accordance with routine procedures as a composition adapted for intravenous or subcutaneous administration to a subject, e.g., a human In some embodiments, pharmaceutical composition for administration by injection are solutions in sterile isotonic aqueous buffer. Where necessary, the pharmaceutical can also include a solubilizing agent and a local anesthetic such as lignocaine to ease pain at the site of the injection. Generally, the ingredients are supplied either separately or mixed together in unit dosage form, for example, as a dry lyophilized powder or water free concentrate in a hermetically sealed container such as an ampoule or sachette indicating the quantity of active agent. Where the pharmaceutical is to be administered by infusion, it can be dispensed with an infusion bottle containing sterile pharmaceutical grade water or saline. Where the pharmaceutical composition is administered by injection, an ampoule of sterile water for injection or saline can be provided so that the ingredients can be mixed prior to administration.

[1491] A pharmaceutical composition for systemic administration may be a liquid, e.g., sterile saline, lactated Ringer's or Hank's solution. In addition, the pharmaceutical composition can be in solid forms and re-dissolved or suspended immediately prior to use. Lyophilized forms are also contemplated.

[1492] The pharmaceutical composition can be contained within a lipid particle or vesicle, such as a liposome or microcrystal, which is also suitable for parenteral administration. The particles can be of any suitable structure, such as unilamellar or plurilamellar, so long as compositions are contained therein. Compounds can be entrapped in “stabilized plasmid-lipid particles” (SPLP) containing the fusogenic lipid dioleoylphosphatidylethanolamine (DOPE), low levels (5-10 mol %) of cationic lipid, and stabilized by a polyethyleneglycol (PEG) coating (Zhang Y. P. et al., Gene Ther. 1999, 6:1438-47). Positively charged lipids such as N-[1-(2,3-dioleoyloxi)propyl]-N,N,N-trimethyl-amoniummethylsulfate, or “DOTAP,” are particularly preferred for such particles and vesicles. The preparation of such lipid particles is well known. See, e.g., U.S. Pat. Nos. 4,880,635; 4,906,477; 4,911,928; 4,917,951; 4,920,016; and 4,921,757; each of which is incorporated herein by reference.

[1493] The pharmaceutical composition described herein may be administered or packaged as a unit dose, for example. The term “unit dose” when used in reference to a pharmaceutical composition of the present disclosure refers to physically discrete units suitable as unitary dosage for the subject, each unit containing a predetermined quantity of active material calculated to produce the desired therapeutic effect in association with the required diluent; i.e., carrier, or vehicle.

[1494] Further, the pharmaceutical composition can be provided as a pharmaceutical kit comprising (a) a container containing a compound of the invention in lyophilized form and (b) a second container containing a pharmaceutically acceptable diluent (e.g., sterile water) for injection. The pharmaceutically acceptable diluent can be used for reconstitution or dilution of the lyophilized compound of the invention. Optionally associated with such container(s) can be a notice in the form prescribed by a governmental agency regulating the manufacture, use or sale of pharmaceuticals or biological products, which notice reflects approval by the agency of manufacture, use or sale for human administration.

[1495] In another aspect, an article of manufacture containing materials useful for the treatment of the diseases described above is included. In some embodiments, the article of manufacture comprises a container and a label. Suitable containers include, for example, bottles, vials, syringes, and test tubes. The containers may be formed from a variety of materials such as glass or plastic. In some embodiments, the container holds a composition that is effective for treating a disease described herein and may have a sterile access port. For example, the container may be an intravenous solution bag or a vial having a stopper pierce-able by a hypodermic injection needle. The active agent in the composition is a compound of the invention. In some embodiments, the label on or associated with the container indicates that the composition is used for treating the disease of choice. The article of manufacture may further comprise a second container comprising a pharmaceutically-acceptable buffer, such as phosphate-buffered saline, Ringer's solution, or dextrose solution. It may further include other materials desirable from a commercial and user standpoint, including other buffers, diluents, filters, needles, syringes, and package inserts with instructions for use.

### [11] Kits, Cells, Vectors, and Delivery

### Kits

[1496] The compositions of the present disclosure may be assembled into kits. In some embodiments, the kit comprises nucleic acid vectors for the expression of the multi-flap prime editors described herein. In other embodiments, the kit further comprises appropriate guide nucleotide sequences (e.g., PEgRNAs and second-site gRNAs) or nucleic acid vectors for the expression of such guide nucleotide sequences, to target the Cas9 protein or prime editor to the desired target sequence.

[1497] The kit described herein may include one or more containers housing components for performing the methods described herein and optionally instructions for use. Any of the kit described herein may further comprise components needed for performing the assay methods. Each component of the kits, where applicable, may be provided in liquid form (e.g., in solution) or in solid form, (e.g., a dry powder). In certain cases, some of the components may be reconstitutable or otherwise processible (e.g., to an active form), for example, by the addition of a suitable solvent or other species (for example, water), which may or may not be provided with the kit.

[1498] In some embodiments, the kits may optionally include instructions and/or promotion for use of the components provided. As used herein, “instructions” can define a component of instruction and/or promotion, and typically involve written instructions on or associated with packaging of the disclosure. Instructions also can include any oral or electronic instructions provided in any manner such that a user will clearly recognize that the instructions are to be associated with the kit, for example, audiovisual (e.g., videotape, DVD, etc.), Internet, and/or web-based communications, etc. The written instructions may be in a form prescribed by a governmental agency regulating the manufacture, use, or sale of pharmaceuticals or biological products, which can also reflect approval by the agency of manufacture, use or sale for animal administration. As used herein, “promoted” includes all methods of doing business including methods of education, hospital and other clinical instruction, scientific inquiry, drug discovery or development, academic research, pharmaceutical industry activity including pharmaceutical sales, and any advertising or other promotional activity including written, oral and electronic communication of any form, associated with the disclosure. Additionally, the kits may include other components depending on the specific application, as described herein.

[1499] The kits may contain any one or more of the components described herein in one or more containers. The components may be prepared sterilely, packaged in a syringe and shipped refrigerated. Alternatively, it may be housed in a vial or other container for storage. A second container may have other components prepared sterilely. Alternatively, the kits may include the active agents premixed and shipped in a vial, tube, or other container.

[1500] The kits may have a variety of forms, such as a blister pouch, a shrink-wrapped pouch, a vacuum sealable pouch, a sealable thermoformed tray, or a similar pouch or tray form, with the accessories loosely packed within the pouch, one or more tubes, containers, a box or a bag. The kits may be sterilized after the accessories are added, thereby allowing the individual accessories in the container to be otherwise unwrapped. The kits can be sterilized using any appropriate sterilization techniques, such as radiation sterilization, heat sterilization, or other sterilization methods known in the art. The kits may also include other components, depending on the specific application, for example, containers, cell media, salts, buffers, reagents, syringes, needles, a fabric, such as gauze, for applying or removing a disinfecting agent, disposable gloves, a support for the agents prior to administration, etc. Some aspects of this disclosure provide kits comprising a nucleic acid construct comprising a nucleotide sequence encoding the various components of the multi-flap prime editing systems (e.g., dual prime editing and quadruple prime editing systems) described herein (e.g., including, but not limited to, the napDNAbps, reverse transcriptases, polymerases, fusion proteins (e.g., comprising napDNAbps and reverse transcriptases (or more broadly, polymerases), extended guide RNAs, and complexes comprising fusion proteins and extended guide RNAs, as well as accessory elements, such as second strand nicking components (e.g., second strand nicking gRNA) and 5′ endogenous DNA flap removal endonucleases for helping to drive the multi-flap prime editing process towards the edited product formation). In some embodiments, the nucleotide sequence(s) comprises a heterologous promoter (or more than a single promoter) that drives expression of the multi-flap prime editing system components.

[1501] Other aspects of this disclosure provide kits comprising one or more nucleic acid constructs encoding the various components of the multi-flap prime editing systems described herein, e.g., comprising a nucleotide sequence encoding the components of the multi-flap prime editing system capable of modifying a target DNA sequence. In some embodiments, the nucleotide sequence comprises a heterologous promoter that drives expression of the multi-flap prime editing system components.

[1502] Some aspects of this disclosure provide kits comprising a nucleic acid construct, comprising (a) a nucleotide sequence encoding a napDNAbp (e.g., a Cas9 domain) fused to a reverse transcriptase and (b) a heterologous promoter that drives expression of the sequence of (a).

### Cells

[1503] Cells that may contain any of the compositions described herein include prokaryotic cells and eukaryotic cells. The methods described herein are used to deliver a Cas9 protein or a multi-flap prime editor into a eukaryotic cell (e.g., a mammalian cell, such as a human cell). In some embodiments, the cell is in vitro (e.g., cultured cell. In some embodiments, the cell is in vivo (e.g., in a subject such as a human subject). In some embodiments, the cell is ex vivo (e.g., isolated from a subject and may be administered back to the same or a different subject).

[1504] Mammalian cells of the present disclosure include human cells, primate cells (e.g., vero cells), rat cells (e.g., GH3 cells, 0C23 cells) or mouse cells (e.g., MC3T3 cells). There are a variety of human cell lines, including, without limitation, human embryonic kidney (HEK) cells, HeLa cells, cancer cells from the National Cancer Institute's 60 cancer cell lines (NCI60), DU145 (prostate cancer) cells, Lncap (prostate cancer) cells, MCF-7 (breast cancer) cells, MDA-MB-438 (breast cancer) cells, PC3 (prostate cancer) cells, T47D (breast cancer) cells, THP-1 (acute myeloid leukemia) cells, U87 (glioblastoma) cells, SHSYSY human neuroblastoma cells (cloned from a myeloma) and Saos-2 (bone cancer) cells. In some embodiments, rAAV vectors are delivered into human embryonic kidney (HEK) cells (e.g., HEK 293 or HEK 293T cells). In some embodiments, rAAV vectors are delivered into stem cells (e.g., human stem cells) such as, for example, pluripotent stem cells (e.g., human pluripotent stem cells including human induced pluripotent stem cells (hiPSCs)). A stem cell refers to a cell with the ability to divide for indefinite periods in culture and to give rise to specialized cells. A pluripotent stem cell refers to a type of stem cell that is capable of differentiating into all tissues of an organism, but not alone capable of sustaining full organismal development. A human induced pluripotent stem cell refers to a somatic (e.g., mature or adult) cell that has been reprogrammed to an embryonic stem cell-like state by being forced to express genes and factors important for maintaining the defining properties of embryonic stem cells (see, e.g., Takahashi and Yamanaka, Cell 126 (4): 663-76, 2006, incorporated by reference herein). Human induced pluripotent stem cell cells express stem cell markers and are capable of generating cells characteristic of all three germ layers (ectoderm, endoderm, mesoderm).

[1505] Additional non-limiting examples of cell lines that may be used in accordance with the present disclosure include 293-T, 293-T, 3T3, 4T1, 721, 9L, A-549, A172, A20, A253, A2780, A2780ADR, A2780cis, A431, ALC, B16, B35, BCP-1, BEAS-2B, bEnd.3, BHK-21, BR 293, BxPC3, C2C12, C3H-10T1/2, C6, C6/36, Cal-27, CGR8, CHO, CML Tl, CMT, COR-L23, COR-L23/5010, COR-L23/CPR, COR-L23/R23, COS-7, COV-434, CT26, D17, DH82, DU145, DuCaP, El4Tg2a, EL4, EM2, EM3, EMT6/AR1, EMT6/AR10.0, FM3, H1299, H69, HB54, HB55, HCA2, Hepa1c1c7, High Five cells, HL-60, HMEC, HT-29, HUVEC, J558L cells, Jurkat, JY cells, K562 cells, KCL22, KG1, Ku812, KYO1, LNCap, Ma-Mel 1, 2, 3 . . . 48, MC-38, MCF-10A, MCF-7, MDA-MB-231, MDA-MB-435, MDA-MB-468, MDCK II, MG63, MONO-MAC 6, MOR/0.2R, MRCS, MTD-1A, MyEnd, NALM-1, NCI-H69/CPR, NCI-H69/LX10, NCI-H69/LX20, NCI-H69/LX4, NIH-3T3, NW-145, OPCN/OPCT Peer, PNT-1A/PNT 2, PTK2, Raji, RBL cells, RenCa, RIN-5F, RMA/RMAS, S2, Saos-2 cells, Sf21, Sf9, SiHa, SKBR3, SKOV-3, T-47D, T2, T84, THP1, U373, U87, U937, VCaP, WM39, WT-49, X63, YAC-1 and YAR cells.

[1506] Some aspects of this disclosure provide cells comprising any of the constructs disclosed herein. In some embodiments, a host cell is transiently or non-transiently transfected with one or more vectors described herein. In some embodiments, a cell is transfected as it naturally occurs in a subject. In some embodiments, a cell that is transfected is taken from a subject. In some embodiments, the cell is derived from cells taken from a subject, such as a cell line. A wide variety of cell lines for tissue culture are known in the art. Examples of cell lines include, but are not limited to, C8161, CCRF-CEM, MOLT, mIMCD-3, NHDF, HeLa-S3, Huh1, Huh4, Huh7, HUVEC, HASMC, HEKn, HEKa, MiaPaCell, Panc1, PC-3, TF1, CTLL-2, C1R, Rat6, CV1, RPTE, A10, T24, J82, A375, ARH-77, Calu1, SW480, SW620, SKOV3, SK-UT, CaCo2, P388D1, SEM-K2, WEHI-231, HB56, TIB55, Jurkat, J45.01, LRMB, Bcl-1, BC-3, IC21, DLD2, Raw264.7, NRK, NRK-52E, MRCS, MEF, Hep G2, HeLa B, HeLa T4, COS, COS-1, COS-6, COS-M6A, BS-C-1 monkey kidney epithelial, BALB/3T3 mouse embryo fibroblast, 3T3 Swiss, 3T3-L1, 132-d5 human fetal fibroblasts; 10.1 mouse fibroblasts, 293-T, 3T3, 721, 9L, A2780, A2780ADR, A2780cis, A 172, A20, A253, A431, A-549, ALC, B16, B35, BCP-1 cells, BEAS-2B, bEnd.3, BHK-21, BR 293. BxPC3. C3H-10T1/2, C6/36, Cal-27, CHO, CHO-7, CHO-IR, CHO-K1, CHO-K2, CHO-T, CHO Dhfr−/−, COR-L23, COR-L23/CPR, COR-L23/5010, COR-L23/R23, COS-7, COV-434, CML T1, CMT, CT26, D17, DH82, DU145, DuCaP, EL4, EM2, EM3, EMT6/AR1, EMT6/AR10.0, FM3, H1299, H69, HB54, HB55, HCA2, HEK-293, HeLa, Hepa1c1c7, HL-60, HMEC, HT-29, Jurkat, JY cells, K562 cells, Ku812, KCL22, KG1, KYO1, LNCap, Ma-Mel 1-48, MC-38, MCF-7, MCF-10A, MDA-MB-231, MDA-MB-468, MDA-MB-435, MDCK II, MDCK 11, MOR/0.2R, MONO-MAC 6, MTD-1A, MyEnd, NCI-H69/CPR, NCI-H69/LX10, NCI-H69/LX20, NCI-H69/LX4, NIH-3T3, NALM-1, NW-145, OPCN/OPCT cell lines, Peer, PNT-1A/PNT 2, RenCa, RIN-5F, RMA/RMAS, Saos-2 cells, Sf-9, SkBr3, T2, T-47D, T84, THP1 cell line, U373, U87, U937, VCaP, Vero cells, WM39, WT-49, X63, YAC-1, YAR, and transgenic varieties thereof.

[1507] Cell lines are available from a variety of sources known to those with skill in the art (see, e.g., the American Type Culture Collection (ATCC) (Manassus, Va.)). In some embodiments, a cell transfected with one or more vectors described herein is used to establish a new cell line comprising one or more vector-derived sequences. In some embodiments, a cell transiently transfected with the components of a CRISPR system as described herein (such as by transient transfection of one or more vectors, or transfection with RNA), and modified through the activity of a CRISPR complex, is used to establish a new cell line comprising cells containing the modification but lacking any other exogenous sequence. In some embodiments, cells transiently or non-transiently transfected with one or more vectors described herein, or cell lines derived from such cells are used in assessing one or more test compounds.

### Vectors

[1508] Some aspects of the present disclosure relate to using recombinant virus vectors (e.g., adeno-associated virus vectors, adenovirus vectors, or herpes simplex virus vectors) for the delivery of the multi-flap prime editors or components thereof described herein, e.g., the split Cas9 protein or a split nucleobase multi-flap prime editors, into a cell. In the case of a split-PE approach, the N-terminal portion of a PE fusion protein and the C-terminal portion of a PE fusion are delivered by separate recombinant virus vectors (e.g., adeno-associated virus vectors, adenovirus vectors, or herpes simplex virus vectors) into the same cell, since the full-length Cas9 protein or multi-flap prime editors exceeds the packaging limit of various virus vectors, e.g., rAAV (˜4.9 kb).

[1509] Thus, in one embodiment, the dislosure contemplates vectors capable of delivering split multi-flap prime editor fusion proteins, or split components thereof. In some embodiments, a composition for delivering the split Cas9 protein or split prime editor into a cell (e.g., a mammalian cell, a human cell) is provided. In some embodiments, the composition of the present disclosure comprises: (i) a first recombinant adeno-associated virus (rAAV) particle comprising a first nucleotide sequence encoding a N-terminal portion of a Cas9 protein or prime editor fused at its C-terminus to an intein-N; and (ii) a second recombinant adeno-associated virus (rAAV) particle comprising a second nucleotide sequence encoding an intein-C fused to the N-terminus of a C-terminal portion of the Cas9 protein or prime editor. The rAAV particles of the present disclosure comprise a rAAV vector (i.e., a recombinant genome of the rAAV) encapsidated in the viral capsid proteins.

[1510] In some embodiments, the rAAV vector comprises: (1) a heterologous nucleic acid region comprising the first or second nucleotide sequence encoding the N-terminal portion or C-terminal portion of a split Cas9 protein or a split multi-flap prime editor in any form as described herein, (2) one or more nucleotide sequences comprising a sequence that facilitates expression of the heterologous nucleic acid region (e.g., a promoter), and (3) one or more nucleic acid regions comprising a sequence that facilitate integration of the heterologous nucleic acid region (optionally with the one or more nucleic acid regions comprising a sequence that facilitates expression) into the genome of a cell. In some embodiments, viral sequences that facilitate integration comprise Inverted Terminal Repeat (ITR) sequences. In some embodiments, the first or second nucleotide sequence encoding the N-terminal portion or C-terminal portion of a split Cas9 protein or a split multi-flap prime editor is flanked on each side by an ITR sequence. In some embodiments, the nucleic acid vector further comprises a region encoding an AAV Rep protein as described herein, either contained within the region flanked by ITRs or outside the region. The ITR sequences can be derived from any AAV serotype (e.g., 1, 2, 3, 4, 5, 6, 7, 8, 9, or 10) or can be derived from more than one serotype. In some embodiments, the ITR sequences are derived from AAV2 or AAV6.

[1511] Thus, in some embodiments, the rAAV particles disclosed herein comprise at least one rAAV2 particle, rAAV6 particle, rAAV8 particle, rPHP.B particle, rPHP.eB particle, or rAAV9 particle, or a variant thereof. In particular embodiments, the disclosed rAAV particles are rPHP.B particles, rPHP.eB particles, rAAV9 particles.

[1512] ITR sequences and plasmids containing ITR sequences are known in the art and commercially available (see, e.g., products and services available from Vector Biolabs, Philadelphia, Pa.; Cellbiolabs, San Diego, Calif.; Agilent Technologies, Santa Clara, Calaif.; and Addgene, Cambridge, Mass.; and Gene delivery to skeletal muscle results in sustained expression and systemic delivery of a therapeutic protein. Kessler P D, Podsakoff G M, Chen X, McQuiston S A, Colosi P C, Matelis L A, Kurtzman G J, Byrne B J. Proc Natl Acad Sci USA. 1996 Nov. 26; 93(24):14082-7; and Curtis A. Machida. Methods in Molecular Medicine™. Viral Vectors for Gene Therapy Methods and Protocols. 10.1385/1-59259-304-6:201© Humana Press Inc. 2003. Chapter 10. Targeted Integration by Adeno-Associated Virus. Matthew D. Weitzman, Samuel M. Young Jr., Toni Cathomen and Richard Jude Samulski; U.S. Pat. Nos. 5,139,941 and 5,962,313, all of which are incorporated herein by reference).

[1513] In some embodiments, the rAAV vector of the present disclosure comprises one or more regulatory elements to control the expression of the heterologous nucleic acid region (e.g., promoters, transcriptional terminators, and/or other regulatory elements). In some embodiments, the first and/or second nucleotide sequence is operably linked to one or more (e.g., 1, 2, 3, 4, 5, or more) transcriptional terminators. Non-limiting examples of transcriptional terminators that may be used in accordance with the present disclosure include transcription terminators of the bovine growth hormone gene (bGH), human growth hormone gene (hGH), SV40, CW3, ϕ, or combinations thereof. The efficiencies of several transcriptional terminators have been tested to determine their respective effects in the expression level of the split Cas9 protein or the split multi-flap prime editor. In some embodiments, the transcriptional terminator used in the present disclosure is a bGH transcriptional terminator. In some embodiments, the rAAV vector further comprises a Woodchuck Hepatitis Virus Posttranscriptional Regulatory Element (WPRE). In certain embodiments, the WPRE is a truncated WPRE sequence, such as “W3.” In some embodiments, the WPRE is inserted 5′ of the transcriptional terminator. Such sequences, when transcribed, create a tertiary structure which enhances expression, in particular, from viral vectors.

[1514] In some embodiments, the vectors used herein may encode the PE fusion proteins, or any of the components thereof (e.g., napDNAbp, linkers, or polymerases). In addition, the vectors used herein may encode the PEgRNAs, and/or the accessory gRNA for second strand nicking. The vectors may be capable of driving expression of one or more coding sequences in a cell. In some embodiments, the cell may be a prokaryotic cell, such as, e.g., a bacterial cell. In some embodiments, the cell may be a eukaryotic cell, such as, e.g., a yeast, plant, insect, or mammalian cell. In some embodiments, the eukaryotic cell may be a mammalian cell. In some embodiments, the eukaryotic cell may be a rodent cell. In some embodiments, the eukaryotic cell may be a human cell. Suitable promoters to drive expression in different types of cells are known in the art. In some embodiments, the promoter may be wild-type. In other embodiments, the promoter may be modified for more efficient or efficacious expression. In yet other embodiments, the promoter may be truncated yet retain its function. For example, the promoter may have a normal size or a reduced size that is suitable for proper packaging of the vector into a virus.

[1515] In some embodiments, the promoters that may be used in the prime editor vectors may be constitutive, inducible, or tissue-specific. In some embodiments, the promoters may be a constitutive promoters. Non-limiting exemplary constitutive promoters include cytomegalovirus immediate early promoter (CMV), simian virus (SV40) promoter, adenovirus major late (MLP) promoter, Rous sarcoma virus (RSV) promoter, mouse mammary tumor virus (MMTV) promoter, phosphoglycerate kinase (PGK) promoter, elongation factor-alpha (EF1a) promoter, ubiquitin promoters, actin promoters, tubulin promoters, immunoglobulin promoters, a functional fragment thereof, or a combination of any of the foregoing. In some embodiments, the promoter may be a CMV promoter. In some embodiments, the promoter may be a truncated CMV promoter. In other embodiments, the promoter may be an EF1a promoter. In some embodiments, the promoter may be an inducible promoter. Non-limiting exemplary inducible promoters include those inducible by heat shock, light, chemicals, peptides, metals, steroids, antibiotics, or alcohol. In some embodiments, the inducible promoter may be one that has a low basal (non-induced) expression level, such as, e.g., the Tet-On® promoter (Clontech). In some embodiments, the promoter may be a tissue-specific promoter. In some embodiments, the tissue-specific promoter is exclusively or predominantly expressed in liver tissue. Non-limiting exemplary tissue-specific promoters include B29 promoter, CD14 promoter, CD43 promoter, CD45 promoter, CD68 promoter, desmin promoter, elastase-1 promoter, endoglin promoter, fibronectin promoter, Flt-1 promoter, GFAP promoter, GPIIb promoter, ICAM-2 promoter, INF-β promoter, Mb promoter, Nphs1 promoter, OG-2 promoter, SP-B promoter, SYN1 promoter, and WASP promoter.

[1516] In some embodiments, the prime editor vectors (e.g., including any vectors encoding the prime editor fusion protein and/or the PEgRNAs, and/or the accessory second strand nicking gRNAs) may comprise inducible promoters to start expression only after it is delivered to a target cell. Non-limiting exemplary inducible promoters include those inducible by heat shock, light, chemicals, peptides, metals, steroids, antibiotics, or alcohol. In some embodiments, the inducible promoter may be one that has a low basal (non-induced) expression level, such as, e.g., the Tet-On® promoter (Clontech).

[1517] In additional embodiments, the prime editor vectors (e.g., including any vectors encoding the prime editor fusion protein and/or the PEgRNAs, and/or the accessory second strand nicking gRNAs) may comprise tissue-specific promoters to start expression only after it is delivered into a specific tissue. Non-limiting exemplary tissue-specific promoters include B29 promoter, CD14 promoter, CD43 promoter, CD45 promoter, CD68 promoter, desmin promoter, elastase-1 promoter, endoglin promoter, fibronectin promoter, Flt-1 promoter, GFAP promoter, GPIIb promoter, ICAM-2 promoter, INF-β promoter, Mb promoter, Nphs1 promoter, OG-2 promoter, SP-B promoter, SYN1 promoter, and WASP promoter.

[1518] In some embodiments, the nucleotide sequence encoding the PEgRNA (or any guide RNAs used in connection with multi-flap prime editing) may be operably linked to at least one transcriptional or translational control sequence. In some embodiments, the nucleotide sequence encoding the guide RNA may be operably linked to at least one promoter. In some embodiments, the promoter may be recognized by RNA polymerase III (Pol III). Non-limiting examples of Pol III promoters include U6, HI and tRNA promoters. In some embodiments, the nucleotide sequence encoding the guide RNA may be operably linked to a mouse or human U6 promoter. In other embodiments, the nucleotide sequence encoding the guide RNA may be operably linked to a mouse or human HI promoter. In some embodiments, the nucleotide sequence encoding the guide RNA may be operably linked to a mouse or human tRNA promoter. In embodiments with more than one guide RNA, the promoters used to drive expression may be the same or different. In some embodiments, the nucleotide encoding the crRNA of the guide RNA and the nucleotide encoding the tracr RNA of the guide RNA may be provided on the same vector. In some embodiments, the nucleotide encoding the crRNA and the nucleotide encoding the tracr RNA may be driven by the same promoter. In some embodiments, the crRNA and tracr RNA may be transcribed into a single transcript. For example, the crRNA and tracr RNA may be processed from the single transcript to form a double-molecule guide RNA. Alternatively, the crRNA and tracr RNA may be transcribed into a single-molecule guide RNA.

[1519] In some embodiments, the nucleotide sequence encoding the guide RNA may be located on the same vector comprising the nucleotide sequence encoding the PE fusion protein. In some embodiments, expression of the guide RNA and of the PE fusion protein may be driven by their corresponding promoters. In some embodiments, expression of the guide RNA may be driven by the same promoter that drives expression of the PE fusion protein. In some embodiments, the guide RNA and the PE fusion protein transcript may be contained within a single transcript. For example, the guide RNA may be within an untranslated region (UTR) of the Cas9 protein transcript. In some embodiments, the guide RNA may be within the 5′ UTR of the PE fusion protein transcript. In other embodiments, the guide RNA may be within the 3′ UTR of the PE fusion protein transcript. In some embodiments, the intracellular half-life of the PE fusion protein transcript may be reduced by containing the guide RNA within its 3′ UTR and thereby shortening the length of its 3′ UTR. In additional embodiments, the guide RNA may be within an intron of the PE fusion protein transcript. In some embodiments, suitable splice sites may be added at the intron within which the guide RNA is located such that the guide RNA is properly spliced out of the transcript. In some embodiments, expression of the Cas9 protein and the guide RNA in close proximity on the same vector may facilitate more efficient formation of the CRISPR complex.

[1520] The multi-flap prime editor vector system may comprise one vector, or two vectors, or three vectors, or four vectors, or five vector, or more. In some embodiments, the vector system may comprise one single vector, which encodes both the PE fusion protein and PEgRNA. In other embodiments, the vector system may comprise two vectors, wherein one vector encodes the PE fusion protein and the other encodes the PEgRNA. In additional embodiments, the vector system may comprise three vectors, wherein the third vector encodes the second strand nicking gRNA used in the herein methods.

[1521] In some embodiments, the composition comprising the rAAV particle (in any form contemplated herein) further comprises a pharmaceutically acceptable carrier. In some embodiments, the composition is formulated in appropriate pharmaceutical vehicles for administration to human or animal subjects.

[1522] Some examples of materials which can serve as pharmaceutically-acceptable carriers include: (1) sugars, such as lactose, glucose and sucrose; (2) starches, such as corn starch and potato starch; (3) cellulose, and its derivatives, such as sodium carboxymethyl cellulose, methylcellulose, ethyl cellulose, microcrystalline cellulose and cellulose acetate; (4) powdered tragacanth; (5) malt; (6) gelatin; (7) lubricating agents, such as magnesium stearate, sodium lauryl sulfate and talc; (8) excipients, such as cocoa butter and suppository waxes; (9) oils, such as peanut oil, cottonseed oil, safflower oil, sesame oil, olive oil, corn oil and soybean oil; (10) glycols, such as propylene glycol; (11) polyols, such as glycerin, sorbitol, mannitol and polyethylene glycol (PEG); (12) esters, such as ethyl oleate and ethyl laurate; (13) agar; (14) buffering agents, such as magnesium hydroxide and aluminum hydroxide; (15) alginic acid; (16) pyrogen-free water; (17) isotonic saline; (18) Ringer's solution; (19) ethyl alcohol; (20) pH buffered solutions; (21) polyesters, polycarbonates and/or polyanhydrides; (22) bulking agents, such as polypeptides and amino acids (23) serum component, such as serum albumin, HDL and LDL; (22) C2-C12 alcohols, such as ethanol; and (23) other non-toxic compatible substances employed in pharmaceutical formulations. Wetting agents, coloring agents, release agents, coating agents, sweetening agents, flavoring agents, perfuming agents, preservative and antioxidants can also be present in the formulation. The terms such as “excipient”, “carrier”, “pharmaceutically acceptable carrier” or the like are used interchangeably herein.

### Delivery Methods

[1523] In some aspects, the invention provides methods comprising delivering one or more polynucleotides encoding the various components of the multi-flap prime editors described herein, such as or one or more vectors as described herein, one or more transcripts thereof, and/or one or proteins transcribed therefrom, to a host cell. In some aspects, the invention further provides cells produced by such methods, and organisms (such as animals, plants, or fungi) comprising or produced from such cells. In some embodiments, a base editor as described herein in combination with (and optionally complexed with) a guide sequence is delivered to a cell.

[1524] Exemplary delivery strategies are described herein elsewhere, which include vector-based strategies, PE ribonucleoprotein complex delivery, and delivery of PE by mRNA methods.

[1525] In some embodiments, the method of delivery provided comprises nucleofection, microinjection, biolistics, virosomes, liposomes, immunoliposomes, polycation or lipid:nucleic acid conjugates, naked DNA, artificial virions, and agent-enhanced uptake of DNA.

[1526] Exemplary methods of delivery of nucleic acids include lipofection, nucleofection, electroporation, stable genome integration (e.g., piggybac), microinjection, biolistics, virosomes, liposomes, immunoliposomes, polycation or lipid:nucleic acid conjugates, naked DNA, artificial virions, and agent-enhanced uptake of DNA. Lipofection is described in e.g., U.S. Pat. Nos. 5,049,386, 4,946,787; and 4,897,355) and lipofection reagents are sold commercially (e.g., Transfectam™, Lipofectin™ and SF Cell Line 4D-Nucleofector X Kit™ (Lonza)). Cationic and neutral lipids that are suitable for efficient receptor-recognition lipofection of polynucleotides include those of Feigner, WO 91/17424; WO 91/16024. Delivery may be to cells (e.g. in vitro or ex vivo administration) or target tissues (e.g. in vivo administration). Delivery may be achieved through the use of RNP complexes.

[1527] The preparation of lipid:nucleic acid complexes, including targeted liposomes such as immunolipid complexes, is well known to one of skill in the art (see, e.g., Crystal, Science 270:404-410 (1995); Blaese et al., Cancer Gene Ther. 2:291-297 (1995); Behr et al., Bioconjugate Chem. 5:382-389 (1994); Remy et al., Bioconjugate Chem. 5:647-654 (1994); Gao et al., Gene Therapy 2:710-722 (1995); Ahmad et al., Cancer Res. 52:4817-4820 (1992); U.S. Pat. Nos. 4,186,183, 4,217,344, 4,235,871, 4,261,975, 4,485,054, 4,501,728, 4,774,085, 4,837,028, and 4,946,787).

[1528] In other embodiments, the method of delivery and vector provided herein is an RNP complex. RNP delivery of fusion proteins markedly increases the DNA specificity of base editing. RNP delivery of fusion proteins leads to decoupling of on- and off-target DNA editing. RNP delivery ablates off-target editing at non-repetitive sites while maintaining on-target editing comparable to plasmid delivery, and greatly reduces off-target DNA editing even at the highly repetitive VEGFA site 2. See Rees, H. A. et al., Improving the DNA specificity and applicability of base editing through protein engineering and protein delivery, Nat. Commun. 8, 15790 (2017), U.S. Pat. No. 9,526,784, issued Dec. 27, 2016, and U.S. Pat. No. 9,737,604, issued Aug. 22, 2017, each of which is incorporated by reference herein.

[1529] Additional methods for the delivery of nucleic acids to cells are known to those skilled in the art. See, for example, US 2003/0087817, incorporated herein by reference.

[1530] Other aspects of the present disclosure provide methods of delivering the multi-flap prime editor constructs into a cell to form a complete and functional prime editor within a cell. For example, in some embodiments, a cell is contacted with a composition described herein (e.g., compositions comprising nucleotide sequences encoding the split Cas9 or the split prime editor or AAV particles containing nucleic acid vectors comprising such nucleotide sequences). In some embodiments, the contacting results in the delivery of such nucleotide sequences into a cell, wherein the N-terminal portion of the Cas9 protein or the prime editor and the C-terminal portion of the Cas9 protein or the prime editor are expressed in the cell and are joined to form a complete Cas9 protein or a complete prime editor.

[1531] It should be appreciated that any rAAV particle, nucleic acid molecule or composition provided herein may be introduced into the cell in any suitable way, either stably or transiently. In some embodiments, the disclosed proteins may be transfected into the cell. In some embodiments, the cell may be transduced or transfected with a nucleic acid molecule. For example, a cell may be transduced (e.g., with a virus encoding a split protein), or transfected (e.g., with a plasmid encoding a split protein) with a nucleic acid molecule that encodes a split protein, or an rAAV particle containing a viral genome encoding one or more nucleic acid molecules. Such transduction may be a stable or transient transduction. In some embodiments, cells expressing a split protein or containing a split protein may be transduced or transfected with one or more guide RNA sequences, for example in delivery of a split Cas9 (e.g., nCas9) protein. In some embodiments, a plasmid expressing a split protein may be introduced into cells through electroporation, transient (e.g., lipofection) and stable genome integration (e.g., piggybac) and viral transduction or other methods known to those of skill in the art.

[1532] In certain embodiments, the compositions provided herein comprise a lipid and/or polymer. In certain embodiments, the lipid and/or polymer is cationic. The preparation of such lipid particles is well known. See, e.g. U.S. Pat. Nos. 4,880,635; 4,906,477; 4,911,928; 4,917,951; 4,920,016; 4,921,757; and 9,737,604, each of which is incorporated herein by reference.

[1533] The guide RNA sequence may be 15-100 nucleotides in length and comprise a sequence of at least 10, at least 15, or at least 20 contiguous nucleotides that is complementary to a target nucleotide sequence. The guide RNA may comprise a sequence of 15, 16, 17, 18, 19, 20, 21, 22, 23, 24, 25, 26, 27, 28, 29, 30, 31, 32, 33, 34, 35, 36, 37, 38, 39, or 40 contiguous nucleotides that is complementary to a target nucleotide sequence. The guide RNA may be 15, 16, 17, 18, 19, 20, 21, 22, 23, 24, 25, 26, 27, 28, 29, 30, 31, 32, 33, 34, 35, 36, 37, 38, 39, 40, 41, 42, 43, 44, 45, 46, 47, 48, 49, or 50 nucleotides in length.

[1534] In some embodiments, the target nucleotide sequence is a DNA sequence in a genome, e.g. a eukaryotic genome. In certain embodiments, the target nucleotide sequence is in a mammalian (e.g. a human) genome.

[1535] The compositions of this disclosure may be administered or packaged as a unit dose, for example. The term “unit dose” when used in reference to a pharmaceutical composition of the present disclosure refers to physically discrete units suitable as unitary dosage for the subject, each unit containing a predetermined quantity of active material calculated to produce the desired therapeutic effect in association with the required diluent, i.e., a carrier or vehicle.

[1536] Treatment of a disease or disorder includes delaying the development or progression of the disease, or reducing disease severity. Treating the disease does not necessarily require curative results.

[1537] As used therein, “delaying” the development of a disease means to defer, hinder, slow, retard, stabilize, and/or postpone progression of the disease. This delay can be of varying lengths of time, depending on the history of the disease and/or individuals being treated. A method that “delays” or alleviates the development of a disease, or delays the onset of the disease, is a method that reduces probability of developing one or more symptoms of the disease in a given time frame and/or reduces extent of the symptoms in a given time frame, when compared to not using the method. Such comparisons are typically based on clinical studies, using a number of subjects sufficient to give a statistically significant result.

[1538] “Development” or “progression” of a disease means initial manifestations and/or ensuing progression of the disease. Development of the disease can be detectable and assessed using standard clinical techniques as well known in the art. However, development also refers to progression that may be undetectable. For purpose of this disclosure, development or progression refers to the biological course of the symptoms. “Development” includes occurrence, recurrence, and onset.

[1539] As used herein “onset” or “occurrence” of a disease includes initial onset and/or recurrence. Conventional methods, known to those of ordinary skill in the art of medicine, can be used to administer the isolated polypeptide or pharmaceutical composition to the subject, depending upon the type of disease to be treated or the site of the disease.

[1540] Without further elaboration, it is believed that one skilled in the art can, based on the above description, utilize the present disclosure to its fullest extent. The following specific embodiments are, therefore, to be construed as merely illustrative, and not limitative of the remainder of the disclosure in any way whatsoever. All publications cited herein are incorporated by reference for the purposes or subject matter referenced herein.

### EXAMPLES

### Example 1. Prime Editing (PE) for Installing Precise Nucleotide Changes in the Genome

[1541] The objective is to develop a transformative genome editing technology for precise and general installation of single nucleotide changes in mammalian genomes. This technology would allow investigators to study the effects of single nucleotide variations in virtually any mammalian gene, and potentially enable therapeutic interventions for correcting pathogenic point mutations in human patients.

[1542] Adoption of the clustered regularly interspaced short palindromic repeat (CRISPR) system for genome editing has revolutionized the life sciences¹⁻³. Although gene disruption using CRISPR is now routine, the precise installation of single nucleotide edits remains a major challenge, despite being necessary for studying or correcting a large number of disease-causative mutations. Homology directed repair (HDR) is capable of achieving such edits, but suffers from low efficiency (often <5%), a requirement for donor DNA repair templates, and deleterious effects of double-stranded DNA break (DSB) formation. Recently, the Liu laboratory developed base editing, which achieves efficient single nucleotide editing without DSBs. Base editors (BEs) combine the CRISPR system with base-modifying deaminase enzymes to convert target C•G or A•T base pairs to A•T or G•C, respectively⁴⁻⁶. Although already widely used by researchers worldwide (>5,000 Liu lab BE constructs distributed by Addgene), current BEs enable only four of the twelve possible base pair conversions and are unable to correct small insertions or deletions. Moreover, the targeting scope of base editing is limited by the editing of non-target C or A bases adjacent to the target base (“bystander editing”) and by the requirement that a PAM sequence exist 15±2 bp from the target base. Overcoming these limitations would therefore greatly broaden the basic research and therapeutic applications of genome editing.

[1543] Here, it is proposed to develop a new precision editing approach that offers many of the benefits of base editing—namely, avoidance of double strand breaks and donor DNA repair templates—while overcoming its major limitations. To achieve this ambitious goal, it is aimed to directly install edited DNA strands at target genomic sites using target-primed reverse transcription (TPRT). In the design discussed herein, CRISPR guide RNA (gRNA) will be engineered to carry a template encoding mutagenic DNA strand synthesis, to be executed by an associated reverse transcriptase (RT) enzyme. The CRISPR nuclease (Cas9)-nicked target site DNA will serve as the primer for reverse transcription, allowing for direct incorporation of any desired nucleotide edit.

### Section 1

[1544] Establish guide RNA-templated reverse transcription of mutagenic DNA strands. Prior studies have shown that, following DNA cleavage but prior to complex dissociation, Cas9 releases the non-target DNA strand to expose a free 3′ terminus. It is hypothesized that this DNA strand is accessible to extension by polymerase enzymes, and that gRNAs can be engineered through extension of their 5′ or 3′ terminus to serve as templates for DNA synthesis. In preliminary in vitro studies, it was established that nicked DNA strands within Cas9:gRNA-bound complexes can indeed prime reverse transcription using the bound gRNA as a template (RT enzyme in trans). Next, different gRNA linkers, primer binding sites, and synthesis templates will be explored to determine optimal design rules in vitro. Then, different RT enzymes, acting in trans or as fusions to Cas9, will be evaluated in vitro. Finally, engineered gRNA designs will be identified that retain efficient binding and cutting activity in cells. Successful demonstration of this aim will provide a foundation for carrying out mutagenic strand synthesis in cells.

### Section 2

[1545] Establish prime editing in human cells. Based on DNA processing and repair mechanisms, it is hypothesized that mutagenic DNA strands (single stranded flaps) can be used to direct specific and efficient editing of target nucleotides. In encouraging preliminary studies, feasibility for this strategy was established by demonstrating editing with model plasmid substrates containing mutagenic flaps. Concurrent with Aim 1, repair outcomes will be further evaluated by systematically varying the mutagenic flap's length, sequence composition, target nucleotide identity, and 3′ terminus. Small 1 to 3 nucleotide insertions and deletions will also be tested. In parallel, and building from Aim 1, Cas9-RT architectures will be evaluated, including fusion proteins and non-covalent recruitment strategies. Cas9-RT architectures and extended gRNAs will be assayed for cellular editing at multiple target sites in the human genome, and will then be optimized for high efficiency. If successful, this aim would immediately establish TPRT genome editing (i.e., prime editing) for basic science applications.

### Section 3

[1546] Achieve site-specific editing of pathogenic mutations in cultured human cells. The potential generality of this technology could enable editing of transversion mutations and indels that are not currently correctable by BEs. Guided by the results of Aim 1 and Aim 2, pathogenic transversion mutations will be targeted in cultured human cells, including the sickle cell disease founder mutation in beta globin (requires an A•T to T•A transversion to correct) and the most prevalent Wilson's disease mutation in ATP7B (requires a G•C to T•A transversion to correct). The correction of small insertion and deletion mutations will also be examined, including the 3-nucleotide AF508 deletion in CFTR that causes cystic fibrosis. If successful, this would lay the foundation for developing powerful therapeutic approaches that address these important human diseases.

### Approach

[1547] The objective is to develop a genome editing strategy that directly installs point mutations at targeted genomic sites. In the technology development phase, efforts will focus on protein and RNA engineering to incorporate TPRT functionality into the CRISPR/Cas system. In vitro assays will be used to carefully probe the function of each step of TPRT, building from the ground up (Aim 1). The second focus area will evaluate editing outcomes in mammalian cells using a combination of model substrates and engineered CRISPR/Cas systems (Aim 2). Finally, the application phase will use the technology to correct mutations that have been intractable to genome editing by other methods (Aim 3).

[1548] The general editing design is shown in FIGS. 1A-1B. Cas9 nickases contain inactivating mutations to the HNH nuclease domain (Spy Cas9 H840A or N863A), restricting DNA cleavage to the PAM containing strand (non-target strand). Guide RNAs (gRNAs) are engineered to contain a template for reverse transcription (designs detailed on slide 5). Shown is a 5′ extension of the gRNA, but 3′ extensions can also be implemented. The Cas9 nickase is fused to a reverse transcriptase (RT) enzyme, either through the C-terminus or N-terminus. The gRNA:Cas9-RT complex targets the DNA region of interest and forms an R loop after displacing the non-target strand. Cas9 nicks the non-target DNA strand. Release of the nicked strand exposes a free 3′-OH terminus that is competent to prime reverse transcription using the extended gRNA as a template. This DNA synthesis reaction is carried out by the fused RT enzyme. The gRNA template encodes a DNA sequence that is homologous to the original DNA duplex, with the exception of the nucleotide that is targeted for editing. The product of reverse transcription is a single stranded DNA flap that encodes the desired edit. This flap, which contains a free 3′ terminus, can equilibrate with the adjacent DNA strand, resulting in a 5′ flap species. The latter species is hypothesized to serve as an efficient substrate for FEN1 (flap endonuclease 1), an enzyme that naturally excises 5′ flaps from Okazaki fragments during lagging strand DNA synthesis, and removes 5′ flaps following strand displacement synthesis that occurs during long-patch base excision repair. Ligation of the nicked DNA produces a mismatched base pair. This intermediate could either undergo reversion to the original base pair or conversion to the desired edited base pair via mismatch repair (MMR) processes. Alternatively, semiconservative DNA replication could give rise to one copy each of the reversion and edit.

### Example 2—Prime Editing: Highly Versatile and Precise Search-and-Replace Genome Editing in Human Cells without Double-Stranded DNA Breaks

[1549] Current genome editing methods can disrupt, delete, or insert target genes with accompanying byproducts of double-stranded DNA breaks using programmable nucleases, and install the four transition point mutations at target loci using base editors Small insertions, small deletions, and the eight transversion point mutations, however, collectively represent most pathogenic genetic variants but cannot be corrected efficiently and without an excess of byproducts in most cell types. Described herein is prime editing, a highly versatile and precise genome editing method that directly writes new genetic information into a specified DNA site using a catalytically impaired Cas9 fused to an engineered reverse transcriptase, programmed with an engineered prime editing guide RNA (PEgRNA) that both specifies the target site and encodes the desired edit. Greater than 175 distinct edits in human cells were performed to establish that prime editing can make targeted insertions, deletions, all 12 possible types of point mutations, and combinations thereof efficiently (typically 20-60%, up to 77% in unsorted cells) and with low byproducts (typically 1-10%), without requiring double-stranded breaks or donor DNA templates. Prime editing was applied in human cells to correct the primary genetic causes of sickle cell disease (requiring an A•T-to-T•A transversion in HBB) and Tay-Sachs disease (requiring a 4-base deletion in HEXA), in both cases efficiently reverting the pathogenic genomic alleles to wild-type with minimal byproducts. Prime editing was also used to create human cell lines with these pathogenic HBB transversion and HEXA insertion mutations, to install the G127V mutation in PRNP that confers resistance to prion disease (requiring a G•C-to-T•A transversion), and to efficiently insert a His6 tag, a FLAG epitope tag, and an extended LoxP site into target loci in human cells. Prime editing offers efficiency and product purity advantages over HDR, and complementary strengths and weaknesses compared to base editing. Consistent with its search-and-replace mechanism, which requires three distinct base-pairing events, prime editing is much less prone to off-target DNA modification at known Cas9 off-target sites than Cas9. Prime editing substantially expands the scope and capabilities of genome editing, and in principle can correct ˜89% of known pathogenic human genetic variants.

[1550] The ability to make virtually any targeted change in the genome of any living cell or organism is a longstanding aspiration of the life sciences. Despite rapid advances in genome editing technologies, the majority of the >75,000 known human genetic variants associated with diseases¹¹¹ cannot be corrected or installed in most therapeutically relevant cells (FIG. 38A). Programmable nucleases such as CRISPR-Cas9 make double-stranded DNA breaks (DSBs) that can disrupt genes by inducing mixtures of insertions and deletions (indels) at target sites¹¹²⁻¹¹⁴. Nucleases can also be used to delete target genes^{115,116}, or insert exogenous genes¹¹⁷⁻¹¹⁹, through homology-independent processes. Double-stranded DNA breaks, however, are also associated with undesired outcomes including complex mixtures of products, translocations¹²⁰, and p53 activation^{121,122}. Moreover, the vast majority of pathogenic alleles differ from their non-pathogenic counterparts by small insertions, deletions, or base substitutions that require much more precise editing technologies to correct (FIG. 38A). Homology-directed repair (HDR) stimulated by nuclease-induced DSBs¹²³ has been widely used to install a variety of precise DNA changes. HDR, however, relies on exogenous donor DNA repair templates, typically generates an excess of indel byproducts from end-joining repair of DSBs, and is inefficient in most therapeutically relevant cell types (T cells and some stem cells being important exceptions)^{124,125}. While enhancing the efficiency and precision of DSB-mediated genome editing remains the focus of promising efforts¹²⁶⁻¹³⁰, these challenges necessitate the exploration of alternative precision genome editing strategies.

[1551] Base editing can efficiently install or correct the four types of transition mutations (C to T, G to A, A to G, and T to C) without requiring DSBs in a wide variety of cell types and organisms, including mammals¹²⁸⁻¹³¹, but cannot currently achieve any of the eight transversion mutations (C to A, C to G, G to C, G to T, A to C, A to T, T to A, and T to G), such as the T•A-to-A•T mutation needed to directly correct the most common cause of sickle cell disease (HBB E6V)¹³². In addition, no DSB-free method has been reported to perform target deletions, such as the removal of the 4-base duplication that causes Tay-Sachs disease (HEXA 1278+TATC)¹³³, or targeted insertions, such as the precise 3-base insertion required to directly correct the most common cause of cystic fibrosis (CFTR ΔF508)¹³⁴. Targeted transversion point mutations, insertions, and deletions thus are difficult to install or correct efficiently and without excess byproducts in most cell types, even though they collectively account for most known pathogenic alleles (FIG. 38A).

[1552] Described herein is the development of prime editing, a new “search-and-replace” genome editing technology that mediates targeted insertions, deletions, and all 12 possible base-to-base conversions at targeted loci in human cells without requiring double-stranded DNA breaks, or donor DNA templates. Prime editors, initially exemplified by PE1, use a reverse transcriptase fused to a programmable nickase and a prime editing extended guide RNA (PEgRNA) to directly copy genetic information from the extension on the PEgRNA into the target genomic locus. A second-generation prime editor (PE2) uses an engineered reverse transcriptase to substantially increase editing efficiencies with minimal (typically <2%) indel formation, while a third-generation PE3 system adds a second guide RNA to nick the non-edited strand, thereby favoring replacement of the non-edited strand and further increasing editing efficiency, typically, to about 20-50% in human cells with about 1-10% indel formation. PE3 offers far fewer byproducts and higher or similar efficiency compared to optimized Cas9 nuclease-initiated HDR, and offers complementary strengths and weaknesses compared to current-generation base editors.

[1553] PE3 was applied at genomic loci in human HEK293T cells to achieve efficient conversion of HBB E6V to wild-type HBB, deletion of the inserted TATC to restore HEXA 1278+TATC to wild-type HEXA, installation in PRNP of the G127V mutation that confers resistance to prion disease^{s} (requiring a G•C-to-T•A transversion), and targeted insertion of a His₆ tag (18 bp), FLAG epitope tag (24 bp), and extended LoxP site for Cre-mediated recombination (44 bp). Prime editing was also successful in three other human cell lines, as well as in post-mitotic primary mouse cortical neurons, with varying efficiencies. Due to a high degree of flexibility in the distance between the initial nick and location of the edit, prime editing is not substantially constrained by the PAM requirement of Cas9 and in principle can target the vast majority of genomic loci. Off-target prime editing is much rarer than off-target Cas9 editing at known Cas9 off-target loci, likely due to the requirement of three distinct DNA base pairing events in order for productive prime editing to take place. By enabling precise targeted insertions, deletions, and all 12 possible classes of point mutations at a wide variety of genomic loci without the need for DSBs or donor DNA templates, prime editing has the potential to advance the study and correction of many gene variants.

### Results

[1554] Strategy for Transferring Information from an Extended Guide RNA into a Target DNA Locus

[1555] Cas9 targets DNA using a guide RNA containing a spacer sequence that hybridizes to the target DNA site^{112-114,136,137}. The aim was to engineer guide RNAs to both specify the DNA target as in natural CRISPR systems^{138,139}, and also to contain new genetic information that replaces the corresponding DNA nucleotides at the target locus. The direct transfer of genetic information from an extended guide RNA into a specified DNA site, followed by replacement of the original unedited DNA, in principle could provide a general means of installing targeted DNA sequence changes in living cells, without dependence on DSBs or donor DNA templates. To achieve this direct information transfer, the aim was to use genomic DNA, nicked at the target site to expose a 3′-hydroxyl group, to prime the reverse transcription of the genetic information from an extension on the engineered guide RNA (hereafter referred to as the prime editing guide RNA, or PEgRNA) directly into the target site (FIG. 38A).

[1556] These initial steps of nicking and reverse transcription, which resemble mechanisms used by some natural mobile genetic elements¹⁴⁰, result in a branched intermediate with two redundant single-stranded DNA flaps on one strand: a 5′ flap that contains the unedited DNA sequence, and a 3′ flap that contains the edited sequence copied from the PEgRNA (FIG. 38B). To achieve a successful edit, this branched intermediate must be resolved so that the edited 3′ flap replaces the unedited 5′ flap. While hybridization of the 5′ flap with the unedited strand is likely to be thermodynamically favored since the edited 3′ flap can make fewer base pairs with the unedited strand, 5′ flaps are the preferred substrate for structure-specific endonucleases such as FEN1¹⁴¹, which excises 5′ flaps generated during lagging-strand DNA synthesis and long-patch base excision repair. It was reasoned that preferential 5′ flap excision and 3′ flap ligation could drive the incorporation of the edited DNA strand, creating heteroduplex DNA containing one edited strand and one unedited strand (FIG. 38B).

[1557] Permanent installation of the edit could arise from subsequent DNA repair that resolves the mismatch between the two DNA strands in a manner that copies the information in the edited strand to the complementary DNA strand (FIG. 38C). Based on a similar strategy developed to maximize the efficiency of DNA base editing¹³¹⁻¹³³, it was envisioned that nicking the non-edited DNA strand, far enough from the site of the initial nick to minimize double-strand break formation, might bias DNA repair to preferentially replace the non-edited strand.

### Validation of Prime Editing Steps In Vitro and in Yeast Cells

[1558] Following cleavage of the PAM-containing DNA strand by the RuvC nuclease domain of Cas9, the PAM-distal fragment of this strand can dissociate from otherwise stable Cas9:sgRNA:DNA complexes¹⁴³. It was hypothesized that the 3′ end of this liberated strand might be sufficiently accessible to prime DNA polymerization. Guide RNA engineering efforts¹⁴⁴⁻¹⁴⁶ and crystal structures of Cas9:sgRNA:DNA complexes¹⁴⁷⁻¹⁴⁹ suggest that the 5′ and 3′ termini of the sgRNA can be extended without abolishing Cas9:sgRNA activity. PEgRNAs were designed by extending sgRNAs to include two critical components: a primer binding site (PBS) that allows the 3′ end of the nicked DNA strand to hybridize to the PEgRNA, and a reverse transcriptase (RT) template containing the desired edit that would be directly copied into the genomic DNA site as the 3′ end of the nicked DNA strand is extended across the RNA template by a polymerase (FIG. 38C).

[1559] These hypotheses were tested in vitro using purified S. pyogenes Cas9 protein. A series of PEgRNA candidates were constructed by extending sgRNAs on either terminus with a PBS sequence (5 to 6 nucleotides, nt) and an RT template (7 to 22 nt). It was confirmed that 5′-extended PEgRNAs direct Cas9 binding to target DNA, and that both 5′-extended PEgRNAs and 3′-extended PEgRNAs support Cas9-mediated target nicking in vitro and DNA cleavage activities in mammalian cells (FIGS. 44A-44C). These candidate PEgRNA designs were tested using pre-nicked 5′-Cy5-labeled dsDNA substrates, catalytically dead Cas9 (dCas9), and a commercial variant of Moloney murine leukemia virus (M-MLV) reverse transcriptase (FIG. 44D). When all components were present, efficient conversion of the fluorescently labeled DNA strand into longer DNA products with gel mobilities, consistent with reverse transcription along the RT template, (FIG. 38D, FIGS. 44D-44E) was observed. Products of desired length were formed with either 5′-extended or 3′-extended PEgRNAs (FIGS. 38D-38E). Omission of dCas9 led to nick translation products derived from reverse transcriptase-mediated DNA polymerization on the DNA template, with no PEgRNA information transfer (FIG. 38D). No DNA polymerization products were observed when the PEgRNA was replaced by a conventional sgRNA, confirming the necessity of the PBS and RT template components of the PEgRNA (FIG. 38D). These results demonstrate that Cas9-mediated DNA melting exposes a single-stranded R-loop that, if nicked, is competent to prime reverse transcription from either a 5′-extended or 3′-extended PEgRNA.

[1560] Next, non-nicked dsDNA substrates were tested with a Cas9 nickase (H840A mutant) that exclusively nicks the PAM-containing strand¹¹². In these reactions, 5′-extended PEgRNAs generated reverse transcription products inefficiently, possibly due to impaired Cas9 nickase activity (FIG. 44F). However, 3′-extended PEgRNAs enabled robust Cas9 nicking and efficient reverse transcription (FIG. 38E). The use of 3′-extended PEgRNAs generated only a single apparent product, despite the potential, in principle, for reverse transcription to terminate anywhere within the remainder of the PEgRNA. DNA sequencing of the products of reactions with Cas9 nickase, RT, and 3′-extended PEgRNAs revealed that the complete RT template sequence was reverse transcribed into the DNA substrate (FIG. 44G). These experiments established that 3′-extended PEgRNAs can template the reverse transcription of new DNA strands while retaining the ability to direct Cas9 nickase activity.

[1561] To evaluate the eukaryotic cell DNA repair outcomes of 3′ flaps produced by PEgRNA-programmed reverse transcription in vitro, DNA nicking and reverse transcription using PEgRNAs, Cas9 nickase, and RT in vitro on reporter plasmid substrates were performed, and the reaction products were then transformed into yeast (S. cerevisiae) cells (FIG. 45A). Encouragingly, when plasmids were edited in vitro with 3′-extended PEgRNAs encoding a T•A-to-A•T transversion that corrects the premature stop codon, 37% of yeast transformants expressed both GFP and mCherry proteins (FIG. 38F, FIG. 45C). Consistent with the results in FIG. 38E and FIG. 44F, editing reactions carried out in vitro with 5′-extended PEgRNAs yielded fewer GFP and mCherry double-positive colonies (9%) than those with 3′-extended PEgRNAs (FIG. 38F and FIG. 45D). Productive editing was also observed using 3′-extended PEgRNAs that insert a single nucleotide (15% double-positive transformants) or delete a single nucleotide (29% double-positive transformants) to correct frameshift mutations (FIG. 38F and FIGS. 45E-45F). DNA sequencing of edited plasmids recovered from double-positive yeast colonies confirmed that the encoded transversion edit occurred at the desired sequence position (FIG. 45G). These results demonstrate that DNA repair in eukaryotic cells can resolve 3′ DNA flaps arising from prime editing to incorporate precise DNA edits including transversions, insertions, and deletions.

### Design of Prime Editor 1 (PE1)

[1562] Encouraged by the results in vitro and in yeast, a prime editing system with a minimum number of components capable of editing genomic DNA in mammalian cells was sought for development. It was hypothesized that 3′-extended PEgRNAs (hereafter referred to simply as PEgRNAs, FIG. 39A) and direct fusions of Cas9 H840A to reverse transcriptase via a flexible linker may constitute a functional two-component prime editing system. HEK293T (immortalized human embryonic kidney) cells were transfected with one plasmid encoding a fusion of wild-type M-MLV reverse transcriptase to either terminus of Cas9 H840A nickase as well as a second plasmid encoding a PEgRNA. Initial attempts led to no detectable T•A-to-A•T conversion at the HEK3 target locus.

[1563] Extension of the PBS in the PEgRNA to 8-15 bases (FIG. 39A), however, led to detectable T•A-to-A•T editing at the HEK3 target site (FIG. 39B), with higher efficiencies for prime editor constructs in which the RT was fused to the C-terminus of Cas9 nickase (3.7% maximal T•A-to-A•T conversion with PBS lengths ranging from 8-15 nt) compared to N-terminal RT—Cas9 nickase fusions (1.3% maximal T•A-to-A•T conversion) (FIG. 39B; all mammalian cell data herein reports values for the entire treated cell population, without selection or sorting, unless otherwise specified). These results suggest that wild-type M-MLV RT fused to Cas9 requires longer PBS sequences for genome editing in human cells compared to what is required in vitro using the commercial variant of M-MLV RT supplied in trans. This first-generation wild-type M-MLV reverse transcriptase fused to the C-terminus of Cas9 H840A nickase was designated as PE1.

[1564] The ability of PE1 to precisely introduce transversion point mutations at four additional genomic target sites specified by the PEgRNA (FIG. 39C) was tested. Similar to editing at the HEK3 locus, efficiency at these genomic sites was dependent on PBS length, with maximal editing efficiencies ranging from 0.7-5.5% (FIG. 39C). Indels from PE1 were low, averaging 0.2±0.1% for the five sites under conditions that maximized each site's editing efficiency (FIG. 46A). PE1 was also able to install targeted insertions and deletions, exemplified by a single-nucleotide deletion (4.0% efficiency), a single-nucleotide insertion (9.7%), and a three-nucleotide insertion (17%) at the HEK3 locus (FIG. 39C). These results establish the ability of PE1 to directly install targeted transversions, insertions, and deletions without requiring double-stranded DNA breaks or DNA templates.

### Design of Prime Editor 2 (PE2)

[1565] While PE1 can install a variety of edits at several loci in HEK293T cells, editing efficiencies were generally low (typically ≤5%) (FIG. 39C). It was hypothesized that engineering the reverse transcriptase in PE1 might improve the efficiency of DNA synthesis within the unique conformational constraints of the prime editing complex, resulting in higher genome editing yields. M-MLV RT mutations have been previously reported that increase enzyme thermostability^{150,151,} processivity¹⁵⁰, and DNA:RNA heteroduplex substrate affinity¹⁵², and that inactivate RNaseH activity¹⁵³. 19 PE1 variants were constructed containing a variety of reverse transcriptase mutations to evaluate their prime editing efficiency in human cells.

[1566] First, a series of M-MLV RT variants that previously emerged from laboratory evolution for their ability to support reverse transcription at elevated temperatures¹⁵⁰ were investigated. Successive introduction of three of these amino acid substitutions (D200N, L603W, and T330P) into M-MLV RT, hereafter referred to as M3, led to a 6.8-fold average increase in transversion and insertion editing efficiency across five genomic loci in HEK293T cells compared to that of PE1 (FIGS. 47A-47S).

[1567] Next, in combination with M3, additional reverse transcriptase mutations that were previously shown to enhance binding to template:PBS complex, enzyme processivity, and thermostability¹⁵², were tested. Among the 14 additional mutants analyzed, a variant with T306K and W313F substitutions, in addition to the M3 mutations, improved editing efficiency an additional 1.3-fold to 3.0-fold compared to M3 for six transversion or insertion edits across five genomic sites in human cells (FIGS. 47A-47S). This pentamutant of M-MLV reverse transcriptase incorporated into the PE1 architecture (Cas9 H840A—M-MLV RT (D200N L603W T330P T306K W313F)) is hereafter referred to as PE2.

[1568] PE2 installs single-nucleotide transversion, insertion, and deletion mutations with substantially higher efficiency than PE1 (FIG. 39C), and is compatible with shorter PBS PEgRNA sequences (FIG. 39C), consistent with an enhanced ability to productively engage transient genomic DNA:PBS complexes. On average, PE2 led to a 1.6- to 5.1-fold improvement in prime editing point mutation efficiency over PE1 (FIG. 39C), and in some cases dramatically improved editing yields up to 46-fold (FIG. 47F and FIG. 471). PE2 also effected targeted insertions and deletions more efficiently than PE1, achieving the targeted insertion of the 24-bp FLAG epitope tag at the HEK3 locus with 4.5% efficiency, a 15-fold improvement over the efficiency of installing this insertion with PE1 (FIG. 47D), and mediated a 1-bp deletion in HEK3 with 8.6% efficiency, 2.1-fold higher than that of PE1 (FIG. 39C). These results establish PE2 as a more efficient prime editor than PE1.

### Optimization of PEgRNA Features

[1569] The relationship between PEgRNA architecture and prime editing efficiency was systematically probed at five genomic loci in HEK293T cells with PE2 (FIG. 39C). In general, priming sites with lower GC content required longer PBS sequences (EMX1 and RNF2, containing 40% and 30% GC content, respectively, in the first 10 nt upstream of the nick), whereas those with greater GC content supported prime editing with shorter PBS sequences (HEK4 and FANCF, containing 80% and 60% GC content, respectively, in the first 10 nt upstream of the nick) (FIG. 39C), consistent with the energetic requirements for hybridization of the nicked DNA strand to the PEgRNA PBS. No PBS length or GC content level was strictly predictive of prime editing efficiency, and other factors such as secondary structure in the DNA primer or PEgRNA extension may also influence editing activity. It is recommended to start with a PBS length of ˜13 nt for a typical target sequence, and exploring different PBS lengths if the sequence deviates from ˜40-60% GC content. When necessary, optimal PBS sequences should be determined empirically.

[1570] Next, the performance determinants of the RT template portion of the PEgRNA were studied. PEgRNAs with RT templates ranging from 10-20 nt in length were systemically evaluated at five genomic target sites using PE2 (FIG. 39D) and with longer RT templates as long as 31 nt at three genomic sites (FIGS. 48A-48C). As with PBS length, RT template length also could be varied to maximize prime editing efficiency, although in general many RT template lengths ≥10 nt long support more efficient prime editing (FIG. 39D). Since some target sites preferred longer RT templates (>15 nt) to achieve higher editing efficiencies (FANCF, EMX1), while other loci preferred short RT templates (HEK3, HEK4) (FIG. 39D), it is recommend both short and long RT templates be tested when optimizing a PEgRNA, starting with ˜10-16 nt.

[1571] Importantly, RT templates that place a C as the nucleotide adjacent to the terminal hairpin of the sgRNA scaffold generally resulted in lower editing efficiency compared to other PEgRNAs with RT templates of similar length (FIGS. 48A-48C). Based on the structure of sgRNAs bound to Cas9^{148,149}, it was speculated that the presence of a C as the first nucleotide of the 3′ extension of a canonical sgRNA can disrupt the sgRNA scaffold fold by pairing with G81, a nucleotide that natively forms a pi stack with Tyr 1356 in Cas9 and a non-canonical base pair with sgRNA A68. Since many RT template lengths support prime editing, it is recommended to choose PEgRNAs in which the first base of the 3′ extension (the last reverse-transcribed base of the RT template) is not C.

### Design of Prime Editor 3 Systems (PE3 and PE3b)

[1572] While PE2 can transfer genetic information from the PEgRNA to the target locus more efficiently than PE1, the manner in which the cell resolves the resulting heteroduplex DNA created by one edited strand and one unedited strand determines if the edit is durable. A previous development of base editing faced a similar challenge since the initial product of cytosine or adenine deamination is heteroduplex DNA containing one edited and one non-edited strand. To increase the efficiency of base editing, a Cas9 D10A nickase was used to introduce a nick into the non-edited strand and to direct DNA repair to that strand, using the edited strand as a template^{129,130,142}. To exploit this principle to enhance prime editing efficiencies, a similar strategy of nicking the non-edited strand using the Cas9 H840A nickase already present in PE2 and a simple sgRNA to induce preferential replacement of the non-edited strand by the cell (FIG. 40A) was tested. Since the edited DNA strand was also nicked to initiate prime editing, a variety of sgRNA-programmed nick locations were tested on the non-edited strand to minimize the production of double-stranded DNA breaks that lead to indels.

[1573] This PE3 strategy was first tested at five genomic sites in HEK293T cells by screening sgRNAs that induce nicks located 14 to 116 bases from the site of the PEgRNA-induced nick, either 5′ or 3′ of the PAM. In four of the five sites tested, nicking the non-edited strand increased the amount of indel-free prime editing products compared to the PE2 system by 1.5- to 4.2-fold, to as high as 55% (FIG. 40B). While the optimal nicking position varied depending on the genomic site, nicks positioned 3′ of the PAM (positive distances in FIG. 40B) approximately 40-90 bp from the PEgRNA-induced nick generally produced favorable increases in prime editing efficiency (averaging 41%) without excess indel formation (6.8% average indels for the sgRNA resulting in the highest editing efficiency for each of the five sites tested) (FIG. 40B). As expected, at some sites, placement of the non-edited strand nick within 40 bp of the PEgRNA-induced nick led to large increases in indel formation up to 22% (FIG. 40B), presumably due to the formation of a double-strand break from nicking both strands close together. At other sites, however, nicking as close as 14 bp away from the PEgRNA-induced nick produced only 5% indels (FIG. 40B), suggesting that locus-dependent factors control conversion of proximal dual nicks into double-strand DNA breaks. At one tested site (HEK4), complementary strand nicks either provided no benefit or led to indel levels that surpassed editing efficiency (up to 26%), even when placed at distances >70 bp from the PEgRNA-induced nick, consistent with an unusual propensity of the edited strand at that site to be nicked by the cell, or to be ligated inefficiently. It is recommend to start with non-edited strand nicks approximately 50 bp from the PEgRNA-mediated nick, and to test alternative nick locations if indel frequencies exceed acceptable levels.

[1574] This model for how complementary strand nicking improved prime editing efficiency (FIG. 40A) predicted that nicking the non-edited strand only after edited strand flap resolution could minimize the presence of concurrent nicks, decreasing the frequency of double-strand breaks that go on to form indels. To achieve temporal control over non-edited strand nicking, sgRNAs with spacer sequences that match the edited strand, but not the original allele, were designed. Using this strategy, referred to hereafter as PE3b, mismatches between the spacer and the unedited allele should disfavor nicking by the sgRNA until after the editing event on the PAM strand takes place. This PE3b approach was tested with five different edits at three genomic sites in HEK293T cells and compared outcomes to those achieved with PE2 and PE3 systems. In all cases, PE3b was associated with substantially lower levels of indels compared to PE3 (3.5- to 30-fold, averaging 12-fold lower indels, or 0.85%), without any evident decrease in overall editing efficiency compared to PE3 (FIG. 40C). Therefore, when the edit lay within a second protospacer, the PE3b system could decrease indels while still improving editing efficiency compared to PE2, often to levels similar to those of PE3 (FIG. 40C).

[1575] Together, these findings established that PE3 systems (Cas9 nickase—optimized reverse transcriptase+PEgRNA+sgRNA) improved editing efficiencies ˜3-fold compared with PE2 (FIGS. 40B-40C). PE3 was accompanied by wider ranges of indels than PE2, as expected given the additional nicking activity of PE3. The use of PE3 is recommended when prioritizing prime editing efficiency. When minimization of indels is critical, PE2 offers ˜10-fold lower indel frequencies. When it is possible to use a sgRNA that recognizes the installed edit to nick the non-edited strand, the PE3b system can achieve PE3-like editing levels while greatly reducing indel formation.

[1576] To demonstrate the targeting scope and versatility of prime editing with PE3, the installation of all possible single nucleotide substitutions across the +1 to +8 positions (counting the first base 3′ of the PEgRNA-induced nick as position +1) of the HEK3 target site using PE3 and PEgRNAs with 10-nucleotide RT templates (FIG. 41A) was explored. Collectively, these 24 distinct edits cover all four transition mutations and all eight transversion mutations, and proceed with editing efficiencies (containing no indels) averaging 33±7.9% (ranging between 14% and 48%), with an average of 7.5±1.8% indels.

[1577] Importantly, long-distance RT templates could also give rise to efficient prime editing with PE3. For example, using PE3 with a 34-nt RT template, point mutations were installed at positions +12, +14, +17, +20, +23, +24, +26, +30, and +33 (12 to 33 bases from the PEgRNA-induced nick) in the HEK3 locus with an average of 36±8.7% efficiency and 8.6±2.0% indels (FIG. 41B). Although edits beyond the +10 position at other loci were not attempted, other RT templates ≥30 nt at three alternative sites also support efficient editing (FIGS. 48A-C). The viability of long RT templates enabled efficient prime editing for dozens of nucleotides from the initial nick site. Since an NGG PAM on either DNA strand occurs on average every ˜8 bp, far less than maximum distances between the edit and the PAM that support efficient prime editing, prime editing is not substantially constrained by the availability of a nearby PAM sequence, in contrast with other precision genome editing methods^{125,142,154}. Given the presumed relationship between RNA secondary structure and prime editing efficiency, when designing PEgRNAs for long-range edits it is prudent to test RT templates of various lengths and, if necessary, sequence compositions (e.g., synonymous codons) to optimize editing efficiency.

[1578] To further test the scope and limitations of the PE3 system for introducing transition and transversion point mutations, 72 additional edits covering all 12 possible types of point mutations across six additional genomic target sites (FIG. 41C-41H) were tested. Overall, indel-free editing efficiency averaged 25±14%, while indel formation averaged 8.3±7.5%. Since the PEgRNA RT template included the PAM sequence, prime editing could induce changes to the PAM sequence. In these cases, higher editing efficiency (averaging 39±9.7%) and lower indel generation (averaging 5.0±2.9%) were observed (FIGS. 41A-41K, point mutations at positions +5 or +6). This increase in efficiency and decrease in indel formation for PAM edits may arise from the inability of the Cas9 nickase to re-bind and nick the edited strand prior to the repair of the complementary strand. Since prime editing supports combination edits with no apparent loss of editing efficiency, editing the PAM, in addition to other desired changes, when possible, is recommended.

[1579] Next, 14 targeted small insertions and 14 targeted small deletions at seven genomic sites using PE3 (FIG. 411) were performed. Targeted 1-bp insertions proceeded with an average efficiency of 32±9.8%, while 3-bp insertions were installed with an average efficiency of 39±16%. Targeted 1-bp and 3-bp deletions were also efficient, proceeding with an average yield of 29±14% and 32±11%, respectively. Indel generation (beyond the targeted insertion or deletion) averaged 6.8±5.4%. Since insertions and deletions introduced between positions +1 and +6 alter the position or the structure of the PAM, it was speculated that insertion and deletion edits in this range are typically more efficient due to the inability of Cas9 nickase to re-bind and nick the edited DNA strand prior to repair of the complementary strand, similar to point mutations that edit the PAM.

[1580] PE3 was also tested for its ability to mediate larger precise deletions of 5 bp to 80 bp at the HEK3 site (FIG. 41J). Very high editing efficiencies (52 to 78%) were observed for 5-, 10-, and 15-bp deletions when using a 13-nt PBS and an RT template that contained 29, 24, or 19 bp of homology to the target locus, respectively. Using a 26-nt RT template supported a larger deletion of 25 bp with 72±4.2% efficiency, while a 20-nt RT template enabled an 80-bp deletion with an efficiency of 52±3.8%. These targeted deletions were accompanied by indel frequencies averaging 11±4.8% (FIG. 41J).

[1581] Finally, the ability of PE3 to mediate 12 combinations of multiple edits at the same target locus consisting of insertions and deletions, insertions and point mutations, deletions and point mutations, or two point mutations across three genomic sites was tested. These combination edits were very efficient, averaging 55% of the target edit with 6.4% indels (FIG. 41K), and demonstrating the ability of prime editing to make combinations of precision insertions, deletions, and point mutations at individual target sites with high efficiency and low indel frequencies.

[1582] Together, the examples in FIGS. 41A-41K represent 156 distinct transition, transversion, insertion, deletion, and combination edits across seven human genomic loci. These findings establish the versatility, precision, and targeting flexibility of prime editing.

Prime Editing Compared with Base Editing

[1583] Current-generation cytidine base editors (CBEs) and adenine base editors (ABEs) can install C•G-to-T•A transition mutations and A•T-to-G•C transition mutations with high efficiency and low indels^{129,130,142}. The application of base editing can be limited by the presence of multiple cytidine or adenine bases within the base editing activity window (typically ˜5-bp wide), which gives rise to unwanted bystander edits^{129,130,142,155}, or by the absence of a PAM positioned approximately 15±2 nt from the target nucleotide^{142,156}. It was anticipated that prime editing could be particularly useful for precise installation of transitions mutations without bystander edits, or when the lack of suitably positioned PAMs precludes favorable positioning the target nucleotide within the CBE or ABE activity window.

[1584] Prime editing and cytosine base editing was compared by editing three genomic loci that contain multiple target cytidines in the canonical base editing window (protospacer positions 4-8, counting the PAM as positions 21-23) using optimized CBEs¹⁵⁷ without nickase activity (BE2max) or with nickase activity (BE4max), or using the analogous PE2 and PE3 prime editing systems. Among the nine total target cytosines within the base editing windows of the three sites, BE4max yielded 2.2-fold higher average total C•G-to-T•A conversion than PE3 for bases in the center of the base editing window (protospacer positions 5-7, FIG. 42A). Likewise, non-nicking BE2max outperformed PE2 by 1.4-fold on average at these well-positioned bases (FIG. 42A). However, PE3 outperformed BE4max by 2.7-fold, and PE2 outperformed BE2max by 2.0-fold, for cytosines beyond the center of the base editing window (average editing of 40±17% for PE3 vs. 15±18% for BE4max, and 22±11% for PE2 vs. 11±13% for BE2max). Overall, indel frequencies for PE2 were very low (averaging 0.86±0.47%), and for PE3 were similar to or modestly higher than that of BE4max (BE4max range: 2.5% to 14%; PE3 range: 2.5% to 21%) (FIG. 42B).

[1585] When comparing the efficiency of base editing to prime editing for installation of precise C•G-to-T•A edits (without any bystander editing), the efficiency of prime editing greatly exceeded that of base editing at the above sites, which like most genomic DNA sites, contain multiple cytosines within the ˜5-bp base editing window (FIG. 42C). At these sites, such as EMX1, which contains cytosines at protospacer positions C5, C6, and C7, BE4max generated few products containing only the single target base pair conversion with no bystander edits. In contrast, prime editing at this site could be used to selectively install a C•G-to-T•A edit at any position or combination of positions (C5, C6, C7, C5+C6, C6+C7, C5+C7, or C5+C6+C7) (FIG. 42C). All precise one-base or two-base edits (that is, edits that do not modify any other nearby bases) were much more efficient with PE3 or PE2 than with BE4max or BE2, respectively, while the three-base C•G-to-T•A edit was more efficient with BE4max (FIG. 42C), reflecting the propensity of base editors to edit all target bases within the activity window. Taken together, these results demonstrate that cytosine base editors can result in higher levels of editing at optimally positioned target bases than PE2 or PE3, but prime editing can outperform base editing at non-optimally positioned target bases, and can edit with much higher precision with multiple editable bases.

[1586] A•T-to-G•C editing was compared at two genomic loci by an optimized non-nicking ABE (ABEmax¹⁵² with a dCas9 instead of a Cas9 nickase, hereafter referred to as ABEdmax) versus PE2, and by the optimized nicking adenine base editor ABEmax versus PE3. At a site that contains two target adenines in the base editing window (HEK3), ABEs were more efficient than PE2 or PE3 for conversion of A5, but PE3 was more efficient for conversion of A8, which lies at the edge of the ABEmax editing window (FIG. 42D). When comparing the efficiency of precision edits in which only a single adenine is converted, PE3 outperformed ABEmax at both A5 and A8 (FIG. 42E). Overall, ABEs produced far fewer indels at HEK3 than prime editors (0.19±0.02% for ABEdmax vs. 1.5±0.46% for PE2, and 0.53±0.16% for ABEmax vs. 11±2.3% for PE3, FIG. 42F). At FANCF, in which only a single A is present within the base editing window, ABE2 and ABEmax outperformed their prime editing counterparts in total target base pair conversion by 1.8- to 2.9-fold, with virtually all edited products from both base editing and prime editing containing only the precise edit (FIGS. 42D-42E). As with the HEK3 site, ABEs produced far fewer indels at the FANCF site (FIG. 42F).

[1587] Collectively, these results indicate that base editing and prime editing offer complementary strengths and weaknesses for making targeted transition mutations. For cases in which a single target nucleotide is present within the base editing window, or when bystander edits are acceptable, current base editors are typically more efficient and result in fewer indels than prime editors. When multiple cytosines or adenines are present and bystander edits are undesirable, or when target bases are poorly positioned for base editing relative to available PAMs, prime editors offer substantial advantages.

### Off-Target Prime Editing

[1588] To result in productive editing, prime editing requires target locus:PEgRNA spacer complementary for the Cas9 domain to bind, target locus:PEgRNA PBS complementarity for PEgRNA-primed reverse transcription to initiate, and target locus:reverse transcriptase product complementarity for flap resolution. It was hypothesized that these three distinct DNA hybridization requirements may minimize off-target prime editing compared to that of other genome editing methods. To test this possibility, HEK293T cells were treated with PE3 or PE2 and 16 total PEgRNAs designed to target four on-target genomic loci, with Cas9 and the four corresponding sgRNAs targeting the same protospacers, or with Cas9 and the same 16 PEgRNAs. These four target loci were chosen because each has at least four well-characterized off-target sites for which Cas9 and the corresponding on-target sgRNA in HEK293T cells is known to cause substantial off-target DNA modification^{118,159}. Following treatment, the four on-target loci and the top four known Cas9 off-target sites for each on-target spacer, were sequenced, for a total of 16 off-target sites (Table 1).

[1589] Consistent with previous studies', Cas9 and the four target sgRNAs modified all 16 of the previously reported off-target loci (FIG. 42G). Cas9 off-target modification efficiency among the four off-target sites for the HEK3 target locus averaged 16%. Cas9 and the sgRNA targeting HEK4 resulted in an average of 60% modification of the four tested known off-target sites. Likewise, off-target sites for EMX1 and FANCF were modified by Cas9:sgRNA at an average frequency of 48% and 4.3%, respectively (FIG. 42G). It was noted that PEgRNAs with Cas9 nuclease modified on-target sites at similar (1- to 1.5-fold lower) efficiency on average compared to sgRNAs, while PEgRNAs with Cas9 nuclease modified off-target sites at ˜4-fold lower average efficiency than sgRNAs.

[1590] Strikingly, PE3 or PE2 with the same 16 tested PEgRNAs containing these four target spacers resulted in much lower off-target editing (FIG. 42H). Of the 16 sites known to undergo off-target editing by Cas9+sgRNA, PE3+PEgRNAs or PE2+PEgRNAs resulted in detectable off-target prime editing at only 3 of 16 off-target sites, with only 1 of 16 showing off-target editing efficiency ≥1% (FIG. 42H). Average off-target prime editing for the PEgRNAs targeting HEK3, HEK4, EMX1, and FANCF at these 16 known Cas9 off-target sites was <0.1%, <2.2±5.2%, <0.1%, and <0.13±0.11%, respectively (FIG. 42H). Notably, at the HEK4 off-target 3 site that Cas9+PEgRNA1 edits with 97% efficiency, PE2+PEgRNA1 results in only 0.7% off-target editing despite sharing the same spacer sequence, demonstrating how the two additional DNA hybridization events required for prime editing compared to Cas9 editing can greatly reduce off-target editing. Taken together, these results suggest that PE3 and PEgRNAs induce much lower off-target DNA editing in human cells than Cas9 and sgRNAs that target the same protospacers.

[1591] Reverse transcription of 3′-extended PEgRNAs in principle can proceed into the guide RNA scaffold. If the resulting 3′ flap, despite a lack of complementary at its 3′ end with the unedited DNA strand, is incorporated into the target locus, the outcome is insertion of PEgRNA scaffold nucleotides that contributes to indel frequency. We analyzed sequencing data from 66 PE3-mediated editing experiments at four loci in HEK293T cells and observed PEgRNA scaffold insertion at a low frequency, averaging 1.7±1.5% total insertion of any number of PEgRNA scaffold nucleotides (FIGS. 56A-56D). It is speculated that inaccessibility of the guide RNA scaffold to the reverse transcriptase due to Cas9 domain binding, as well as cellular excision during flap resolution of the mismatched 3′ end of the 3′ flap that results from PEgRNA scaffold reverse transcription, minimizes products that incorporate PEgRNA scaffold nucleotides. While such events are rare, future efforts to engineer PEgRNAs or prime editor proteins that minimize PEgRNA scaffold incorporation may further decrease indel frequencies.

[1592] Deaminases in some base editors can act in a Cas9-independent manner, resulting in low-level but widespread off-target DNA editing among first-generation CBEs (but not ABEs)¹⁶⁰⁻¹⁶² and off-target RNA editing among first-generation CBEs and ABEs¹⁶³⁻¹⁶⁵, although newer CBE and ABE variants with engineered deaminases greatly reduce Cas9-independent off-target DNA and RNA editing¹⁶³⁻¹⁶⁵. Prime editors lack base-modification enzymes such as deaminases, and therefore have no inherent ability to modify DNA or RNA bases in a Cas9-independent manner.

[1593] While the reverse transcriptase domain in prime editors in principle could process properly primed RNA or DNA templates in cells, it was noted that retrotransposons such as those in the LINE-1 family¹⁶⁶, endogenous retroviruses^{167,168}, and human telomerase all provided active endogenous human reverse transcriptases. Their natural presence in human cells suggests that reverse transcriptase activity itself is not substantially toxic. Indeed, no PE3-dependent differences were observed in HEK293T cell viability compared to that of controls expressing dCas9, Cas9 H840A nickase, or PE2 with R110S+K103L (PE2-dRT) mutations that inactivate the reverse transcriptase¹⁶⁹ (FIGS. 49A-49B).

[1594] The above data and analyses notwithstanding, additional studies are needed to assess off-target prime editing in an unbiased, genome-wide manner, as well as to characterize the extent to which the reverse transcriptase variants in prime editors, or prime editing intermediates, may affect cells.

[1595] Prime Editing Pathogenic Transversion, Insertion, and Deletion Mutations in Human Cells

[1596] The ability of PE3 to directly install or correct in human cells transversion, small insertion, and small deletion mutations that cause genetic diseases, was tested. Sickle cell disease is most commonly caused by an A•T-to-T•A transversion mutation in HBB, resulting in the mutation of Glu6→Val in beta-globin. Treatment of hematopoietic stem cells ex vivo with Cas9 nuclease and a donor DNA template for HDR, followed by enrichment of edited cells, transplantation, and engraftment is a promising potential strategy for the treatment of sickle-cell disease¹⁷⁰. However, this approach still generates many indel-containing byproducts in addition to the correctly edited HBB allele¹⁷⁰⁻¹⁷¹. While base editors generally produce far fewer indels, they cannot currently make the T•A-to-A•T transversion mutation needed to directly restore the normal sequence of HBB.

[1597] PE3 was used to install the HBB E6V mutation in HEK293T cells with 44% efficiency and 4.8% indels (FIG. 43A. From the mixture of PE3-treated cells, we isolated six HEK293T cell lines that are homozygous (triploid) for the HBB E6V allele (FIGS. 53A-53D), demonstrating the ability of prime editing to generate human cell lines with pathogenic mutations. To correct the HBB E6V allele to wild-type HBB, we treated homozygous HBB E6V HEK293T cells with PE3 and a PEgRNA programmed to directly revert the HBB E6V mutation to wild-type HBB. In total, 14 PEgRNA designs were tested. After three days, DNA sequencing revealed that all 14 PEgRNAs when combined with PE3 gave efficient correction of HBB E6V to wild-type HBB (≥26% wild-type HBB without indels), and indel levels averaging 2.8±0.70% (FIG. 50A). The best PEgRNA resulted in 52% correction of HBB E6V to wild-type with 2.4% indels (FIG. 43A). Introduction of a silent mutation that modifies the PAM recognized by the PEgRNA modestly improved editing efficiency and product purity, to 58% correction with 1.4% indels (FIG. 43A). These results establish that prime editing can install and correct a pathogenic transversion point mutation in a human cell line with high efficiency and minimal byproducts.

[1598] Tay-Sachs disease is most often caused by a 4-bp insertion into the HEXA gene (HEXA 1278+TATC)¹³⁶. PE3 was used to install this 4-bp insertion into HEK293T cells with 31% efficiency and 0.8% indels (FIG. 43B), and isolated two HEK293T cell lines that are homozygous for the HEXA 1278+TATC allele (FIGS. 53A-53D). These cells were used to test 43 PEgRNAs and three nicking sgRNAs with PE3 or PE3b systems for correction of the pathogenic insertion in HEXA (FIG. 50B), either by perfect reversion to the wild-type allele or by a shifted 4-bp deletion that disrupts the PAM and installs a silent mutation. Nineteen of the 43 PEgRNAs tested resulted in ≥20% editing. Perfect correction to wild-type HEXA with PE3 or PE3b and the best PEgRNA proceeded with similar average efficiencies (30% for PE3 vs. 33% for PE3b), but the PE3b system was accompanied by 5.3-fold fewer indel products (1.7% for PE3 vs. 0.32% for PE3b) (FIG. 43B and FIG. 50B). These findings demonstrate the ability of prime editing to make precise small insertions and deletions that install or correct a pathogenic allele in mammalian cells efficiently and with a minimum of byproducts.

[1599] Finally, the installation of a protective SNP into PRNP, the gene encoding the human prion protein (PrP), was tested. PrP misfolding causes progressive and fatal neurodegenerative prion disease that can arise spontaneously, through inherited dominant mutations in the PRNP gene, or through exposure to misfolded PrP¹⁷². A naturally occurring PRNP G127V mutant allele confers resistance to prion disease in humans¹³⁸ and mice¹⁷³. PE3 was used to install G127V into the human PRNP allele in HEK293T cells, which requires a G•C-to-T•A transversion. Four PEgRNAs and three nicking sgRNAs were evaluated with the PE3 system. After three days of exposure to the most effective PE3 and PEgRNA, DNA sequencing revealed 53±11% efficiency of installing the G127V mutation and indel levels of 1.7±0.7% (FIG. 43C). Taken together, these results establish the ability of prime editing in human cells to install or correct transversion, insertion, or deletion mutations that cause or confer resistance to disease efficiently, and with a minimum of byproducts.

[1600] Prime Editing in Various Human Cell Lines and Primary Mouse Neurons

[1601] Next, prime editing was tested for its ability to edit endogenous sites in three additional human cell lines. In K562 (leukemic bone marrow) cells, PE3 was used to perform transversion edits in the HEK3, EMX1, and FANCF sites, as well as the 18-bp insertion of a 6xHis tag in HEK3. An average editing efficiency of 15-30% was observed for each of these four PE3-mediated edits, with indels averaging 0.85-2.2% (FIG. 43A). In U2OS (osteosarcoma) cells, transversion mutations in HEK3 and FANCF were installed, as well as a 3-bp insertion and 6xHis tag insertion into HEK3, with 7.9-22% editing efficiency that exceeded indel formation 10- to 76 fold (FIG. 43A). Finally, in HeLa (cervical cancer) cells, a 3-bp insertion into HEK3 was performed, with 12% average efficiency and 1.3% indels (FIG. 43A). Collectively, these data indicate that multiple cell lines beyond HEK293T cells support prime editing, although editing efficiencies vary by cell type and are generally less efficient than in HEK293T cells. Editing:indel ratios remained high in all tested human cell lines.

[1602] To determine if prime editing is possible in post-mitotic, terminally differentiated primary cells, primary cortical neurons harvested from E18.5 mice were transduced with a dual split-PE3 lentiviral delivery system in which split-intein splicing²⁰³ reconstitutes PE2 protein from N-terminal and C-terminal halves, each delivered from a separate virus. To restrict editing to post-mitotic neurons, the human synapsin promoter, which is highly specific for mature neurons²⁰⁴, was used to drive expression of both PE2 protein components. GFP was fused through a self-cleaving P2A peptide²⁰⁵ to the N-terminal half of PE2. Nuclei from neurons were isolated two weeks following dual viral transduction and were sequenced directly, or sorted for GFP expression before sequencing. A 7.1±1.2% average prime editing to install a transversion at the DNMT1 locus with 0.58±0.14% average indels in sorted nuclei (FIG. 43D was observed. Cas9 nuclease in the same split-intein dual lentivirus system resulted in 31±5.5% indels among sorted cortical neuron nuclei (FIG. 43D. These data indicate that post-mitotic, terminally differentiated primary cells can support prime editing, and thus establish that prime editing does not require cell replication.

[1603] Prime Editing Compared with Cas9-Initiated HDR

[1604] The performance of PE3 was compared with that of optimized Cas9-initiated HDR^{128,125} in mitotic cell lines that support HDR¹²⁸. HEK293T, HeLa, K562 and U2OS cells were treated with Cas9 nuclease, a sgRNA, and an ssDNA donor oligonucleotide template designed to install a variety of transversion and insertion edits (FIGS. 43E-43G, and FIGS. 51A-51F). Cas9-initiated HDR in all cases successfully installed the desired edit, but with far higher levels of byproducts (predominantly indels), as expected from treatments that cause double-stranded breaks. Using PE3 in HEK293T cells, HBB E6V installation and correction proceeded with 42% and 58% average editing efficiency with 2.6% and 1.4% average indels, respectively (FIG. 43E and FIG. 43G). In contrast, the same edits with Cas9 nuclease and an HDR template resulted in 5.2% and 6.7% average editing efficiency, with 79% and 51% average indel frequency (FIG. 43E and FIG. 43G). Similarly, PE3 installed PRNP G127V with 53% efficiency and 1.7% indels, whereas Cas9-initiated HDR installed this mutation with 6.9% efficiency and 53% indels (FIG. 43E and FIG. 43G). Thus, the ratio of editing:indels for HBB E6V installation, HBB E6V correction, and PRNP G127V installation on average was 270-fold higher for PE3 than for Cas9-initiated HDR.

[1605] Comparisons between PE3 and HDR in human cell lines other than HEK293T showed similar results, although with lower PE3 editing efficiencies. For example, in K562 cells, PE3-mediated 3-bp insertion into HEK3 proceeded with 25% efficiency and 2.8% indels, compared with 17% editing and 72% indels for Cas9-initiated HDR, a 40-fold editing:indel ratio advantage favoring PE3 (FIGS. 43F-43G). In U2OS cells, PE3 performed this 3-bp insertion with 22% efficiency and 2.2% indels, while Cas9-initiated HDR resulted in 15% editing with 74% indels, a 49-fold lower editing:indel ratio (FIGS. 43F-43G). In HeLa cells, PE3 made this insertion with 12% efficiency and 1.3% indels, versus 3.0% editing and 69% indels for Cas9-initiated HDR, a 210-fold editing:indel ratio difference (FIGS. 43F-43G). Collectively, these data indicated that HDR typically results in similar or lower editing efficiencies and far higher indels than PE3 in the four cell lines tested (FIGS. 51A-51F).

[1606] Discussion and Future Directions

[1607] The ability to insert DNA sequences with single-nucleotide precision is an especially enabling prime editing capability. For example, PE3 was used to precisely insert into the HEK3 locus in HEK293T cells a His₆tag (18 bp, 65% average efficiency), a FLAG epitope tag (24 bp, 18% average efficiency), and an extended LoxP site (44 bp, 23% average efficiency) that is the native substrate for Cre recombinase. Average indels ranged between 3.0% and 5.9% for these examples (FIG. 43H). Many biotechnological, synthetic biology, and therapeutic applications are envisioned to arise from the ability to efficiently and precisely introduce new DNA sequences into target sites of interest in living cells.

[1608] Collectively, the prime editing experiments described herein installed 18 insertions up to 44 bp, 22 deletions up to 80 bp, 113 point mutations including 77 transversions, and 18 combination edits, across 12 endogenous loci in the human and mouse genomes at locations ranging from 3 bp upstream to 29 bp downstream of the start of a PAM without making explicit double-stranded DNA breaks. These results establish prime editing as a remarkably versatile genome editing method. Because the overwhelming majority (85-99%) of insertions, deletions, indels, and duplications in ClinVar are ≤30 bp (FIGS. 52A-52D), in principle prime editing can correct up to ˜89% of the 75,122 currently known pathogenic human genetic variants in ClinVar (transitions, transversions, insertions, deletions, indels, and duplications in FIG. 38A), with additional potential to ameliorate diseases caused by copy number gain or loss.

[1609] Importantly, for any desired edit the flexibility of prime editing offers many possible choices of PEgRNA-induced nick locations, sgRNA-induced second nick locations, PBS lengths, RT template lengths, and which strand to edit first, as demonstrated extensively herein. This flexibility, which contrasts with more limited options typically available for other precision genome editing methods^{125,142,154}, allows editing efficiency, product purity, DNA specificity, or other parameters to be optimized to suit the needs of a given application, as shown in FIGS. 50A-50B in which testing 14 and 43 PEgRNAs covering a range of prime editing strategies optimized correction of pathogenic HBB and HEXA alleles, respectively.

[1610] Much additional research is needed to further understand and improve prime editing. Additional modifications of prime editor systems may be required to expand their compatibility to include other cell types, such as post-mitotic cells. Interfacing prime editing with viral and non-viral in vitro and in vivo delivery strategies is needed to fully explore the potential of prime editing to enable a wide range of applications including the study and treatment of genetic diseases. By enabling highly precise targeted transitions, transversions, small insertions, and small deletions in the genomes of mammalian cells without requiring double-stranded breaks or HDR, however, prime editing provides a new “search-and-replace” capability that substantially expands the scope of genome editing.

### Methods

[1611] General Methods

[1612] DNA amplification was conducted by PCR using Phusion U Green Multiplex PCR Master Mix (ThermoFisher Scientific) or Q5 Hot Start High-Fidelity 2× Master Mix (New England BioLabs) unless otherwise noted. DNA oligonucleotides, including Cy5-labeled DNA oligonucleotides, dCas9 protein, and Cas9 H840A protein were obtained from Integrated DNA Technologies. Yeast reporter plasmids were derived from previously described plasmids64 and cloned by the Gibson assembly method. All mammalian editor plasmids used herein were assembled using the USER cloning method as previously described¹⁷⁵. Plasmids expressing sgRNAs were constructed by ligation of annealed oligonucleotides into BsmBI-digested acceptor vector. Plasmids expressing PEgRNAs were constructed by Gibson assembly or Golden Gate assembly using a custom acceptor plasmid (see supplemental ‘Golden Gate assembly’ outline). Sequences of sgRNA and PEgRNA constructs used herein are listed in Tables 2A-2C and Tables 3A-3R. All vectors for mammalian cell experiments were purified using Plasmid Plus Midiprep kits (Qiagen) or PureYield plasmid miniprep kits (Promega), which include endotoxin removal steps. All experiments using live animals were approved by the Broad Institute Institutional and Animal Care and Use Committees. Wild-type C57BL/6 mice were obtained from Charles River (#027).

[1613] In Vitro Biochemical Assays

[1614] PEgRNAs and sgRNAs were transcribed in vitro using the HiScribe T7 in vitro transcription kit (New England Biolabs) from PCR-amplified templates containing a T7 promoter sequence. RNA was purified by denaturing urea PAGE and quality-confirmed by an analytical gel prior to use. 5′-Cy5-labeled DNA duplex substrates were annealed using two oligonucleotides (Cy5-AVA024 and AVA025; 1:1.1 ratio) for the non-nicked substrate or three oligonucleotides (Cy5-AVA023, AVA025 and AVA026; 1:1.1:1.1) for the pre-nicked substrate by heating to 95° C. for 3 minutes followed by slowly cooling to room temperature (Tables 2A-2C). Cas9 cleavage and reverse transcription reactions were carried out in 1× cleavage buffer²⁰⁵ supplemented with dNTPs (20 mM HEPES-K, pH 7.5; 100 mM KC1; 5% glycerol; 0.2 mM EDTA, pH 8.0; 3 mM MgCl2; 0.5 mM dNTP mix; 5 mM DTT). dCas9 or Cas9 H840A (5 μM final) and the sgRNA or PEgRNA (5 μM final) were pre-incubated at room temperature in a 5 μL reaction mixture for 10 minutes prior to the addition of duplex DNA substrate (400 nM final), followed by the addition of Superscript III reverse transcriptase (ThermoFisher Scientific), an undisclosed M-MLV RT variant, when applicable. Reactions were carried out at 37° C. for 1 hour, then diluted to a volume of 10 μL with water, treated with 0.2 μL of proteinase K solution (20 mg/mL, ThermoFisher Scientific), and incubated at room temperature for 30 minutes. Following heat inactivation at 95° C. for 10 minutes, reaction products were combined with 2× formamide gel loading buffer (90% formamide; 10% glycerol; 0.01% bromophenol blue), denatured at 95° C. for 5 minutes, and separated by denaturing urea-PAGE gel (15% TBE-urea, 55° C., 200V). DNA products were visualized by Cy5 fluorescence signal using a Typhoon FLA 7000 biomolecular imager.

[1615] Electrophoretic mobility shift assays were carried out in 1× binding buffer (1× cleavage buffer+10 μg/mL heparin) using pre-incubated dCas9:sgRNA or dCas9:PEgRNA complexes (concentration range between 5 nM and 1 μM final) and Cy5-labeled duplex DNA (Cy5-AVA024 and AVA025; 20 nM final). After 15 minutes of incubation at 37° C., the samples were analyzed by native PAGE gel (10% TBE) and imaged for Cy5 fluorescence.

[1616] For DNA sequencing of reverse transcription products, fluorescent bands were excised and purified from urea-PAGE gels, then 3′ tailed with terminal transferase (TdT; New England Biolabs) in the presence of dGTP or dATP according to the manufacturer's protocol. Tailed DNA products were diluted 10-fold with binding buffer (40% saturated aqueous guanidinium chloride+60% isopropanol) and purified by QIAquick spin column (Qiagen), then used as templates for primer extension by Klenow fragment (New England Biolabs) using primer AVA134 (A-tailed products) or AVA135 (G-tailed products) (Tables 2A-2C). Extension were amplified by PCR for 10 cycles using primers AVA110 and AVA122, then sequenced with AVA037 using the Sanger method (Tables 2A-2C).

[1617] Yeast Fluorescent Reporter Assays

[1618] Dual fluorescent reporter plasmids containing an in-frame stop codon, a +1 frameshift, or a −1 frameshift were subjected to 5′-extended PEgRNA or 3′-extended PEgRNA prime editing reactions in vitro as described above. Following incubation at 37° C. for 1 hour, the reactions were diluted with water and plasmid DNA was precipitated with 0.3 M sodium acetate and 70% ethanol. Resuspended DNA was transformed into S. cerevisiae by electroporation as previously described' and plated on synthetic complete media without leucine (SC(glucose), L-). GFP and mCherry fluorescence signals were visualized from colonies with the Typhoon FLA 7000 biomolecular imager.

[1619] General Mammalian Cell Culture Conditions

[1620] HEK293T (ATCC CRL-3216), U2OS (ATTC HTB-96), K562 (CCL-243), and HeLa (CCL-2) cells were purchased from ATCC and cultured and passaged in Dulbecco's Modified Eagle's Medium (DMEM) plus GlutaMAX (ThermoFisher Scientific), McCoy's 5A Medium (Gibco), RPMI Medium 1640 plus GlutaMAX (Gibco), or Eagle's Minimal Essential Medium (EMEM, ATCC), respectively, each supplemented with 10% (v/v) fetal bovine serum (Gibco, qualified) and 1× Penicillin Streptomycin (Corning). All cell types were incubated, maintained, and cultured at 37° C. with 5% CO₂. Cell lines were authenticated by their respective suppliers and tested negative for mycoplasma.

[1621] HEK293T Tissue Culture Transfection Protocol and Genomic DNA Preparation

[1622] HEK293T cells grown were seeded on 48-well poly-D-lysine coated plates (Corning). 16 to 24 hours post-seeding, cells were transfected at approximately 60% confluency with 1 μL of Lipofectamine 2000 (Thermo Fisher Scientific) according to the manufacturer's protocols and 750 ng of PE plasmid, 250 ng of PEgRNA plasmid, and 83 ng of sgRNA plasmid (for PE3 and PE3b). Unless otherwise stated, cells were cultured 3 days following transfection, after which the media was removed, the cells were washed with 1× PBS solution (Thermo Fisher Scientific), and genomic DNA was extracted by the addition of 150 μL of freshly prepared lysis buffer (10 mM Tris-HCl, pH 7.5; 0.05% SDS; 25 μg/mL Proteinase K (ThermoFisher Scientific)) directly into each well of the tissue culture plate. The genomic DNA mixture was incubated at 37° C. for 1 to 2 hours, followed by an 80° C. enzyme inactivation step for 30 minutes. Primers used for mammalian cell genomic DNA amplification are listed in Table 4. For HDR experiments in HEK293T cells, 231 ng of nuclease-expression plasmid, 69 ng of sgRNA expression plasmid, 50 ng (1.51 pmol) 100-nt ssDNA donor template (PAGE-purified; Integrated DNA Technologies) was lipofected using 1.4 μL Lipofectamine 2000 (ThermoFisher) per well. Genomic DNA from all HDR experiments was purified using the Agencourt DNAdvance Kit (Beckman Coulter), according to the manufacturer' s protocol.

[1623] High-Throughput DNA Sequencing of Genomic DNA Samples

[1624] Genomic sites of interest were amplified from genomic DNA samples and sequenced on an Illumina MiSeq as previously described with the following modifications^{129,130}. Briefly, amplification primers containing Illumina forward and reverse adapters (Table 4) were used for a first round of PCR (PCR 1) amplifying the genomic region of interest. 25 μL PCR 1 reactions were performed with 0.5 μM of each forward and reverse primer, 1 μL of genomic DNA extract and 12.5 μL of Phusion U Green Multiplex PCR Master Mix. PCR reactions were carried out as follows: 98° C. for 2 minutes, then 30 cycles of [98° C. for 10 seconds, 61° C. for 20 seconds, and 72° C. for 30 seconds], followed by a final 72° C. extension for 2 minutes. Unique Illumina barcoding primer pairs were added to each sample in a secondary PCR reaction (PCR 2). Specifically, 25 μL of a given PCR 2 reaction contained 0.5 μM of each unique forward and reverse illumina barcoding primer pair, 1 μL of unpurified PCR 1 reaction mixture, and 12.5 μL of Phusion U Green Multiplex PCR 2× Master Mix. The barcoding PCR 2 reactions were carried out as follows: 98° C. for 2 minutes, then 12 cycles of [98° C. for 10 seconds, 61° C. for 20 seconds, and 72° C. for 30 seconds], followed by a final 72° C. extension for 2 minutes. PCR products were evaluated analytically by electrophoresis in a 1.5% agarose gel. PCR 2 products (pooled by common amplicons) were purified by electrophoresis with a 1.5% agarose gel using a QIAquick Gel Extraction Kit (Qiagen), eluting with 40 μL of water. DNA concentration was measured by fluorometric quantification (Qubit, ThermoFisher Scientific) or qPCR (KAPA Library Quantification Kit-Illumina, KAPA Biosystems) and sequenced on an Illumina MiSeq instrument according to the manufacturer's protocols.

[1625] Sequencing reads were demultiplexed using MiSeq Reporter (Illumina). Alignment of amplicon sequences to a reference sequence was performed using CRISPResso2¹⁷⁸. For quantification of point mutation editing, CRISPResso2 was run in standard mode with “discard_indel_reads” on. Editing efficiency was calculated as: (frequency of specified point mutation in non-discarded reads)×(# of non-discarded reads)÷total reads. For insertion or deletion edits, CRISPResso2 was run in HDR mode using the desired allele as the expected allele (e flag), and with “discard_indel_reads” ON. Editing yield was calculated as the number of HDR aligned reads divided by total reads. For all edits, indel yields were calculated as the number of discarded reads divided by total reads.

[1626] Nucleofection of U205, K562, and HeLa Cells

[1627] Nucleofection was performed in all experiments using K562, HeLa, and U2OS cells. For PE conditions in these cell types, 800 ng prime editor-expression plasmid, 200 ng PEgRNA-expression plasmid, and 83 ng nicking plasmid was nucleofected in a final volume of 20 μL in a 16-well nucleocuvette strip (Lonza). For HDR conditions in these three cell types, 350 ng nuclease-expression plasmid, 150 ng sgRNA-expression plasmid and 200 pmol (6.6 μg) 100-nt ssDNA donor template (PAGE-purified; Integrated DNA Technologies) was nucleofected in a final volume of 20 μL per sample in a 16-well Nucleocuvette strip (Lonza). K562 cells were nucleofected using the SF Cell Line 4D-Nucleofector X Kit (Lonza) with 5×10⁵ cells per sample (program FF-120), according to the manufacturers protocol. U2OS cells were nucleofected using the SE Cell Line 4D-Nucleofector X Kit (Lonza) with 3-4×10⁵ cells per sample (program DN-100), according to the manufacturers protocol. HeLa cells were nucleofected using the SE Cell Line 4D-Nucleofector X Kit (Lonza) with 2×10⁵ cells per sample (program CN-114), according to the manufacturers protocol. Cells were harvested 72 hours after nucleofection for genomic DNA extraction.

[1628] Genomic DNA Extraction for HDR Experiments

[1629] Genomic DNA from all HDR comparison experiments in HEK293T, HEK293T HBB E6V, K562, U205, and HeLa cells was purified using the Agencourt DNAdvance Kit (Beckman Coulter), according to the manufacturer's protocol.

[1630] Comparison Between PE2, PE3, BE2, BE4max, ABEdmax, and ABEmax

[1631] HEK293T cells were seeded on 48-well poly-D-lysine coated plates (Corning). After 16 to 24 hours, cells were transfected at approximately 60% confluency. For base editing with CBE or ABE constructs, cells were transfected with 750 ng of base editor plasmid, 250 ng of sgRNA expression plasmid, and 1 μL of Lipofectamine 2000 (Thermo Fisher Scientific). PE transfections were performed as described above. Genomic DNA extraction for PE and BE was performed as described above.

[1632] Determination of PE3 Activity at Known Cas9 Off-Target Sites

[1633] To evaluate PE3 off-target editing activity at known Cas9 off-target sites, genomic DNA extracted from HEK293T cells 3 days after transfection with PE3 was used as template for PCR amplification of 16 previously reported Cas9 off-target genomic sites^{118,159} (the top four off-target sites each for the HEK3, EMX1, FANCF, and HEK4 spacers; primer sequences are listed in Table 4). These genomic DNA samples were identical to those used for quantifying on-target PE3 editing activities shown in FIGS. 41A-41K; PEgRNA and nicking sgRNA sequences are listed in Tables 3A-3R. Following PCR amplification of off-target sites, amplicons were sequenced on the Illumina MiSeq platform as described above (HTS analysis). For determining Cas9 nuclease, Cas9 H840A nickase, dCas9, and PE2-dRT on-target and off-target editing activity, HEK293T cells were transfected with 750 ng of editor plasmid (Cas9 nuclease, Cas9 H840A nickase, dCas9, or PE2-dRT), 250 ng of PEgRNA or sgRNA plasmid, and 1 μL of Lipofectamine 2000. Genomic DNA was isolated from cells 3 days after transfection as described above. On-target and off-target genomic loci were amplified by PCR using primer sequences in Table 4 and sequenced on an Illumina MiSeq.

[1634] HTS data analysis was performed using CRISPResso2¹⁷⁸. The editing efficiencies of Cas9 nuclease, Cas9 H840A nickase, and dCas9 were quantified as the percent of total sequencing reads containing indels. For quantification of PE3 and PE3-dRT off-targets, aligned sequencing reads were examined for point mutations, insertions, or deletions that were consistent with the anticipated product of PEgRNA reverse transcription initiated at the Cas9 nick site. Single nucleotide variations occurring at <0.1% overall frequency among total reads within a sample were excluded from analysis. For reads containing single nucleotide variations that both occurred at frequencies ≥0.1% and were partially consistent with the PEgRNA-encoded edit, t-tests (unpaired, one-tailed, α=0.5) were used to determine if the variants occurred at significantly higher levels compared to samples treated with PEgRNAs that contained the same spacer but encoded different edits. To avoid differences in sequencing errors, comparisons were made between samples that were sequenced simultaneously within the same MiSeq run. Variants that did not meet the criteria of p-value >0.05 were excluded. Off-target PE3 editing activity was then calculated as the percentage of total sequencing reads that met the above criteria.

[1635] Generation of a HEK293T Cell Line Containing the HBB E6V Mutation Using Cas9-Initiated HDR

[1636] HEK293T cells were seeded in a 48-well plate and transfected at approximately 60% confluency with 1.5 μL of Lipofectamine 2000, 300 ng of Cas9 DlOA nickase plasmid, 100 ng of sgRNA plasmid, and 200 ng of 100-mer ssDNA donor template (Table 5). Three days after transfection, media was exchanged for fresh media. Four days after transfection, cells were dissociated using 30 μL of TrypLE solution and suspended in 1.5 mL of media. Single cells were isolated into individual wells of two 96-well plates by fluorescence-activated cell sorting (FACS) (Beckman-Coulter Astrios). See FIGS. 53A-53B for representative FACS sorting examples. Cells were expanded for 14 days prior to genomic DNA sequencing as described above. Of the isolated clonal populations, none was found to be homozygous for the HBB E6V mutation, so a second round of editing by lipofection, sorting, and outgrowth was repeated in a partially edited cell line to yield a cell line homozygous for the E6V allele.

[1637] Generation of a HEK293T Cell Line Containing the HBB E6V Mutation Using PE3

[1638] 2.5×104 HEK293T cells grown in the absence of antibiotic were seeded on 48-well poly-D-lysine coated plates (Corning). 16 to 24 hours post-seeding, cells were transfected at approximately 70% confluency with 1μL of Lipofectamine 2000 (Thermo Fisher Scientific) according to the manufacturer's protocols and 750 ng of PE2-P2A-GFP plasmid, 250 ng of PEgRNA plasmid, and 83 ng of sgRNA plasmid. After 3 days post transfection, cells were washed with phosphate-buffered saline (Gibco) and dissociated using TrypLE Express (Gibco). Cells were then diluted with DMEM plus GlutaMax (Thermo Fisher Scientific) supplemented with 10% (v/v) FBS (Gibco) and passed through a 35-μm cell strainer (Corning) prior to sorting. Flow cytometry was carried out on a LE-MA900 cell sorter (Sony). Cells were treated with 3 nM DAPI (BioLegend) 15 minutes prior to sorting. After gating for doublet exclusion, single DAPI-negative cells with GFP fluorescence above that of a GFP-negative control cell population were sorted into 96-well flat-bottom cell culture plates (Corning) filled with pre-chilled DMEM with GlutaMax supplemented with 10% FBS. See FIGS. 53A-53B for representative FACS sorting examples. Cells were cultured for 10 days prior to genomic DNA extraction and characterization by HTS, as described above. A total of six clonal cell lines were identified that are homozygous for the E6V mutation in HBB.

[1639] Generation of a HEK293T Cell Line Containing the HEXA 1278+TATC Insertion Using PE3

[1640] HEK293T cells containing the HEXA 1278+TATC allele were generated following the protocol described above for creation of the HBB E6V cell line; PEgRNA and sgRNA sequences are listed in Tables 2A-2C under the FIGS. 43A-43H subheading. After transfection and sorting, cells were cultured for 10 days prior to genomic DNA extraction and characterization by HTS, as described above. Two heterozygous cell lines were isolated that contained 50% HEXA 1278+TATC alleles, and two homozygous cell lines containing 100% HEXA 1278+TATC alleles were recovered.

[1641] Cell Viability Assays

[1642] HEK293T cells were seeded in 48-well plates and transfected at approximately 70% confluency with 750 ng of editor plasmid (PE3, PE3 R110S K103L, Cas9 H840A nickase, or dCas9), 250 ng of HEK3-targeting PEgRNA plasmid, and 1 μL of Lipofectamine 2000, as described above. Cell viability was measured every 24 hours post-transfection for 3 days using the CellTiter-Glo 2.0 assay (Promega) according to the manufacturer's protocol. Luminescence was measured in 96-well flat-bottomed polystyrene microplates (Corning) using a M1000 Pro microplate reader (Tecan) with a 1-second integration time.

[1643] Lentivirus Production

[1644] Lentivirus was produced as previously described²⁰⁶. T-75 flasks of rapidly dividing HEK293T cells (ATCC; Manassas, Va., USA) were transfected with lentivirus production helper plasmids pVSV-G and psPAX2 in combination with modified lentiCRISPR_v2 genomes carrying intein-split PE2 editor using FuGENE HD (Promega, Madison, Wis., USA) according to the manufacturer's directions. Four split-intein editor constructs were designed: 1) a viral genome encoding a U6-PEgRNA expression cassette and the N-terminal portion (1-573) of Cas9 H840A nickase fused to the Npu N-intein, a self-cleaving P2A peptide, and GFP-KASH; 2) a viral genome encoding the Npu C-intein fused to the C-terminal remainder of PE2; 3) a viral genome encoding the Npu C-intein fused to the C-terminal remainder of Cas9 for the Cas9 control; and 4) a nicking sgRNA for DNMT1. The split-intein mediates trans splicing to join the two halves of PE2 or Cas9, while the P2A GFP-KASH enables co-translational production of a nuclear membrane-localized GFP. After 48 hours, supernatant was collected, centrifuged at 500 g for 5 minutes to remove cellular debris, and filtered using a 0.45 μm filter. Filtered supernatant was concentrated using the PEG-it Virus Precipitation Solution (System Biosciences, Palo Alto, Calif., USA) according to the manufacturer's directions. The resulting pellet was resuspended in Opti-MEM (Thermo Fisher Scientific, Waltham, Mass., USA) using 1% of the original media volume. Resuspended pellet was flash-frozen and stored at −80° C. until use.

[1645] Mouse Primary Cortical Neuron Dissection and Culture

[1646] E18.5 dissociated cortical cultures were harvested from timed-pregnant C57BL/6 mice (Charles River). Embryos were harvested from pregnant mice after euthanasia by CO2 followed by decapitation. Cortical caps were dissected in ice-cold Hibernate-E supplemented with penicillin/streptomycin (Life Technologies). Following a rinse with ice-cold Hibernate-E, tissue was digested at 37° C. for 8 minutes in papain/DNase (Worthington/Sigma). Tissue was triturated in NBActiv4 (BrainBits) supplemented with DNase. Cells were counted and plated in 24-well plates at 100,000 cells per well. Half of the media was changed twice per week.

[1647] Prime Editing in Primary Neurons and Nuclei Isolation

[1648] At DIV 1, 15 μL of lentivirus was added at 10:10:1 ratio of N-terminal:C-terminal:nicking sgRNA. At DIV 14, neuronal nuclei were isolated using the EZ-PREP buffer (Sigma D8938) following the manufacturer's protocol. All steps were performed on ice or at 4° C. Media was removed from dissociated cultures, and cultures were washed with ice-cold PBS. PBS was aspirated and replaced with 200 μL EZ-PREP solution. Following a 5-minute incubation on ice, EZ-PREP was pipetted across the surface of the well to dislodge remaining cells. The sample was centrifuged at 500 g for 5 minutes, and the supernatant removed. Samples were washed with 200 μL EZ-PREP and centrifuged again at 500 g for 5 minutes. Samples were resuspended with gentle pipetting in 200 μL ice-cold Nuclei Suspension Buffer (NSB) consisting of 100 μg/mL BSA and 3.33 μM Vybrant DyeCycle Ruby (Thermo Fisher) in 1×PBS, then centrifuged at 500 g for 5 minutes. The supernatant was removed and nuclei were resuspended in 100 μL NSB and sorted into 100 μL Agencourt DNAdvance lysis buffer using a MoFlo Astrios (Beckman Coulter) at the Broad Institute flow cytometry facility. Genomic DNA was purified according to the manufacturer's Agencourt DNAdvance instructions.

[1649] RNA-Sequencing and Data Analysis

[1650] HEK293T cells were co-transfected with PRNP-targeting or HEXA-targeting PEgRNAs and PE2, PE2-dRT, or Cas9 H840A nickase. 72 hours following transfection, total RNA was harvested from cells using TRIzol reagent (Thermo Fisher) and purified with RNeasy Mini kit (Qiagen) including on-column DNasel treatment. Ribosomes were depleted from total RNA using the rRNA removal protocol of the TruSeq Stranded Total RNA library prep kit (Illumina) and subsequently washed with RNAClean XP beads (Beckman Coulter). Sequencing libraries were prepared using ribo-depleted RNA on a SMARTer PrepX Apollo NGS library prep system (Takara) following the manufacturer's protocol. Resulting libraries were visualized on a 2200 TapeStation (Agilent Technologies), normalized using a Qubit dsDNA HS assay (Thermo Fisher), and sequenced on a NextSeq 550 using high output v2 flow cell (Illumina) as 75-bp paired-end reads. Fastq files were generated with bcl2fastq2 version 2.20 and trimmed using TrimGalore version 0.6.2 (github.com/FelixKrueger/TrimGalore) to remove low-quality bases, unpaired sequences, and adaptor sequences. Trimmed reads were aligned to a Homo sapiens genome assembly GRCh¹⁴⁸ with a custom Cas9 H840A gene entry using RSEM version 1.3.1²⁰⁷. The limma-voom²⁰⁸ package was used to normalize gene expression levels and perform differential expression analysis with batch effect correction. Differentially expressed genes were called with FDR-corrected p-value <0.05 and fold-change >2 cutoffs, and results were visualized in R.

[1651] ClinVar Analysis

[1652] The ClinVar variant summary was downloaded from NCBI (accessed Jul. 15, 2019), and the information contained therein was used for all downstream analysis. The list of all reported variants was filtered by allele ID in order to remove duplicates and by clinical significance in order to restrict the analysis to pathogenic variants. The list of pathogenic variants was filtered sequentially by variant type in order to calculate the fraction of pathogenic variants that are insertions, deletions, etc. Single nucleotide variants (SNVs) were separated into two categories (transitions and transversions) based on the reported reference and alternate alleles. SNVs that did not report reference or alternate alleles were excluded from the analysis.

[1653] The lengths of reported insertions, deletions, and duplications were calculated using reference/alternate alleles, variant start/stop positions, or appropriate identifying information in the variant name. Variants that did not report any of the above information were excluded from the analysis. The lengths of reported indels (single variants that include both insertions and deletions relative to the reference genome) were calculated by determining the number of mismatches or gaps in the best pairwise alignment between the reference and alternate alleles. Frequency distributions of variant lengths were calculated using GraphPad Prism 8.

[1654] Data Availability

[1655] High-throughput sequencing data are deposited to the NCBI Sequence Read Archive database. Plasmids encoding PE1, PE2/PE3, and PEgRNA expression vectors will be available from Addgene.

[1656] Code Availability

[1657] The script used to quantify PEgRNA scaffold insertion is provided in FIGS. 60A-60B.

[1658] Supplemental Information: Tables and Sequences

TABLE 1
Activities of prime editors, Cas9 nuclease, Cas9 H840A nickase, and PE2-dRT at
HEK3, HEK4, EMX1, and FANCF on-target and off-target sites. PE2/PE3 editing is shown as % prime
editing alongside % indels (in parentheses). % indels are shown for Cas9, Cas9 H840A nickase (nCas9),
and PE2-dRT at the top four previously characterized off-target sites^{179, 180}. sgRNA and PEgRNA
sequences can be found in Tables 3A-3R, under the FIGs. 42A-42H heading. All values are the average of
three independent biological replicates.

| | PE pegRNA | | | | | | | | | | | | | | | | | | | |
|---|---|---|---|---|---|---|---|---|---|---|---|---|---|---|---|---|---|---|---|---|
| | HEK3 (PE3) | | | | | HEK4 (PE2) | | | | | EXM1 (PE3) | | | | | FANCF (PE3) | | | | |
| Site | — | 1 | 2 | 3 | 4 | — | 1 | 2 | 3 | 4 | — | 1 | 2 | 3 | 4 | — | 1 | 2 | 3 | 4 |
| On-target | | 44.2 | 61.2 | 40.4 | 48.4 | | 18.2 | 14.4 | 9.8 | 7.9 | | 28.6 | 14.1 | 35.7 | 15.4 | | 56.8 | 32.4 | 42.8 | 47.6 |
| | | (11.9) | (8.8) | (16.5) | (3.3) | | (0.9) | (1.8) | (2.0) | (2.2) | | (3.5) | (2.4) | (3.3) | (2.9) | | (9.3) | (16.7) | (13.6) | (12.0) |
| Off-target 1 | | <0.1 | <0.1 | <0.1 | <0.1 | | <0.1 | 0.4 | <0.1 | 0.4 | | <0.1 | <0.1 | <0.1 | <0.1 | | <0.1 | 0.6 | <0.1 | <0.1 |
| | | (<0.1) | (<0.1) | (<0.1) | (<0.1) | | (<0.1) | (<0.1) | (<0.1) | (0.1) | | (0.1) | (0.1) | (0.1) | (0.1) | | (0.1) | (0.1) | (0.1) | (<0.1) |
| Off-target 2 | | <0.1 | <0.1 | <0.1 | <0.1 | | <0.1 | <0.1 | <0.1 | <0.1 | | <0.1 | <0.1 | <0.1 | <0.1 | | <0.1 | <0.1 | <0.1 | <0.1 |
| | | (<0.1) | (<0.1) | (<0.1) | (<0.1) | | (0.1) | (0.1) | (0.1) | (0.1) | | (<0.1) | (0.1) | (0.1) | (0.1) | | (<0.1) | (<0.1) | (0.1) | (<0.1) |
| Off-target 3 | | <0.1 | <0.1 | <0.1 | <0.1 | | 0.2 | 6.8 | 19.2 | 7.9 | | <0.1 | <0.1 | <0.1 | <0.1 | | <0.1 | <0.1 | <0.1 | <0.1 |
| | | (<0.1) | (<0.1) | (<0.1) | (<0.1) | | (0.5) | (1.9) | (0.5) | (3.5) | | (0.3) | (0.3) | (0.3) | (0.3) | | (<0.1) | (<0.1) | (0.1) | (<0.1) |
| Off-target 4 | | <0.1 | <0.1 | <0.1 | <0.1 | | <0.1 | <0.1 | <0.1 | <0.1 | | <0.1 | <0.1 | <0.1 | <0.1 | | <0.1 | <0.1 | <0.1 | <0.1 |
| | | (0.1) | (0.1) | (0.1) | (<0.1) | | (<0.1) | (0.1) | (0.2) | (<0.1) | | (0.1) | (0.1) | (0.2) | (0.1) | | (<0.1) | (<0.1) | (<0.1) | (<0.1) |
| | Cas9 pegRNA | | | | | | | | | | | | | | | | | | | |
| | HEK3 | | | | | HEK4 | | | | | EXM1 | | | | | FANCF | | | | |
| Site | [symbol] gRNA | 1 | 2 | 3 | 4 | [symbol] gRNA | 1 | 2 | 3 | 4 | [symbol] gRNA | 1 | 2 | 3 | 4 | [symbol] gRNA | 1 | 2 | 3 | 4 |
| On-target | 91.8 | 87.5 | 89.2 | 89.1 | 86.8 | 71.8 | 68.6 | 72.8 | 72.8 | 70.9 | 85.6 | 79.7 | 70.6 | 76.6 | 76.0 | 78.7 | 55.9 | 58.3 | 51.8 | 52.0 |
| Off-target 1 | 17.2 | 1.9 | 5.5 | 5.2 | 1.8 | 54.2 | 39.5 | 48.4 | 49.7 | 49.2 | 81.1 | 63.5 | 48.1 | 53.0 | 59.6 | 12.6 | 1.9 | 1.9 | 1.7 | 1.7 |
| Off-target 2 | 38.0 | 6.5 | 12.6 | 11.8 | 4.7 | 42.5 | 19.5 | 29.4 | 27.3 | 30.3 | 58.3 | 12.0 | 6.0 | 8.2 | 12.9 | 1.1 | 0.2 | 0.2 | 0.2 | 0.1 |
| Off-target 3 | 8.8 | 0.6 | 1.7 | 1.5 | 0.5 | 98.1 | 96.9 | 97.3 | 97.6 | 97.5 | 14.8 | 4.2 | 3.1 | 3.6 | 4.8 | 2.4 | 0.2 | <0.1 | 0.2 | 0.2 |
| Off-target 4 | 0.3 | <0.1 | <0.1 | 0.1 | <0.1 | 45.3 | 16.9 | 28.0 | 27.5 | 29.7 | 39.5 | 1.3 | 0.9 | 0.6 | 1.3 | 1.0 | 0.2 | 0.2 | 0.2 | 0.2 |
| | nCas9 pegRNA | | | | | | | | | | | | | | | | | | | |
| | HEK3 | | | | | HEK4 | | | | | EXM1 | | | | | FANCF | | | | |
| Site | — | 1 | 2 | 3 | 4 | — | 1 | 2 | 3 | 4 | — | 1 | 2 | 3 | 4 | — | 1 | 2 | 3 | 4 |
| Off-target 1 | | <0.1 | <0.1 | <0.1 | <0.1 | | <0.1 | <0.1 | <0.1 | <0.1 | | 0.1 | 0.1 | <0.1 | 0.1 | | <0.1 | <0.1 | <0.1 | <0.1 |
| Off-target 2 | | <0.1 | <0.1 | <0.1 | <0.1 | | <0.1 | <0.1 | <0.1 | <0.1 | | 0.3 | 0.1 | <0.1 | <0.1 | | <0.1 | <0.1 | <0.1 | <0.1 |
| Off-target 3 | | <0.1 | <0.1 | <0.1 | <0.1 | | 0.3 | 0.5 | 0.7 | 0.7 | | <0.1 | <0.1 | <0.1 | <0.1 | | <0.1 | <0.1 | <0.1 | <0.1 |
| Off-target 4 | | <0.1 | <0.1 | <0.1 | <0.1 | | <0.1 | 0.1 | <0.1 | <0.1 | | 1.5 | 0.1 | 0.1 | 0.4 | | <0.1 | <0.1 | <0.1 | <0.1 |
| | PE2-dRT pegRNA | | | | | | | | | | | | | | | | | | | |
| | HEK3 | | | | | HEK4 | | | | | EXM1 | | | | | FANCF | | | | |
| Site | — | 1 | 2 | 3 | 4 | — | 1 | 2 | 3 | 4 | — | 1 | 2 | 3 | 4 | — | 1 | 2 | 3 | 4 |
| Off-target 1 | | <0.1 | <0.1 | <0.1 | <0.1 | | 0.1 | 0.2 | <0.1 | <0.1 | | 0.1 | 0.1 | 0.1 | 0.1 | | <0.1 | <0.1 | <0.1 | <0.1 |
| Off-target 2 | | <0.1 | <0.1 | <0.1 | <0.1 | | <0.1 | 0.1 | <0.1 | <0.1 | | <0.1 | 0.3 | <0.1 | <0.1 | | <0.1 | <0.1 | <0.1 | <0.1 |
| Off-target 3 | | <0.1 | <0.1 | <0.1 | <0.1 | | <0.1 | 0.1 | 1.4 | 0.9 | | <0.1 | <0.1 | <0.1 | <0.1 | | <0.1 | <0.1 | <0.1 | <0.1 |
| Off-target 4 | | <0.1 | <0.1 | <0.1 | <0.1 | | 0.1 | 0.1 | 0.1 | 0.2 | | 0.9 | 0.1 | 0.1 | 0.2 | | <0.1 | <0.1 | <0.1 | <0.1 |

[symbol]

indicates data missing or illegible when filed

[1659] Tables 2A-2C: Sequences of DNA oligonucleotides, PEgRNAs, and sgRNAs used for in vitro experiments.

TABLE 2A
DNA oligonucleotides

| OLIGO- | |
|---|---|
| NUCLEOTIDE | SEQUENCE |
| AVA023 | 5CY5-CCTGGGTCAATCCTTGGGGCCCAGACTGAGCACG (SEQ ID NO: |
| | 374) |
| AVA024 | 5CY5- |
| | CCTGGGTCAATCCTTGGGGCCCAGACTGAGCACGTGATGGCAGAGG |
| | AAAGG (SEQ ID NO: 375) |
| AVA025 | 5PHOS- |
| | CCTTTCCTCTGCCATCACGTGCTCAGTCTGGGCCCCAAGGATTGACC |
| | CAGG (SEQ ID NO: 376) |
| AVA026 | 5PHOS-TGATGGCAGAGGAAAGG (SEQ ID NO: 377) |
| AVA037 | GCAGGCTTTAAAGGAACCAATTC (SEQ ID NO: 378) |
| AVA110 | GCAGGCTTTAAAGGAACCAATTCCCTGGGTCAATCCTTGGGGC (SEQ |
| | ID NO: 379) |
| AVA122 | CTCTGGAGGATCTAGCGGAG (SEQ ID NO: 380) |
| AVA134 | CTCTGGAGGATCTAGCGGAGTTTTTTTTTTTTTTTTTTTT (SEQ ID NO: |
| | 381) |
| AVA135 | CTCTGGAGGATCTAGCGGAGCCCCCCCCCCCCCC (SEQ ID NO: 382) |

TABLE 2B
5′-extended PEgRNAs

| | | | | | RT |
|---|---|---|---|---|---|
| | | | LINKER | PBS | TEMPLATE |
| | SPACER | 5′ EXTENSION | LENGTH | LENGTH | LENGTH |
| PEGRNA | SEQUENCE | SEQUENCE | (NT) | (NT) | (NT) |
| PEGRNA1 | GGCCCAGACTGA | GGCTAACCGTGCCATTT | 15 | 5 | 7 |
| | GCACGTGA (SEQ | GATCAGGTCA (SEQ ID | | | |
| | ID NO: 383) | NO: 429) | | | |
| PEGRNA 2 | GGCCCAGACTGA | GGCTAACCGTGCAAATT | 15 | 5 | 7 |
| | GCACGTGA (SEQ | AACAAACTAA (SEQ ID | | | |
| | ID NO: 384) | NO: 430) | | | |
| PEGRNA 3 | GGCCCAGACTGA | GGCCATCTCGTGCAAAT | 15 | 5 | 8 |
| | GCACGTGA (SEQ | TAACAAACTAA (SEQ ID | | | |
| | ID NO: 385) | NO: 431) | | | |
| PEGRNA 4 | GGCCCAGACTGA | GGTCCTCTGCCATCTCG | 15 | 5 | 15 |
| | GCACGTGA (SEQ | TGCAAATTAACAAACTA | | | |
| | ID NO: 386) | A (SEQ ID NO: 432) | | | |
| PEGRNA 5 | GGCCCAGACTGA | GGCTTCCTTTCCTCTGC | 15 | 5 | 22 |
| | GCACGTGA (SEQ | CATCTCGTGCAAATTAA | | | |
| | ID NO: 387) | CAAACTAA (SEQ ID NO: | | | |
| | | 433) | | | |
| 5′- | GGCCCAGACTGA | GGCTAACCGTGCCATTT | 15 | 5 | 7 |
| PEGRNA_RT_7_ | GCACGTGA (SEQ | GATCAGGTCA (SEQ ID | | | |
| A | ID NO: 388) | NO: 434) | | | |
| 5′- | GGCCCAGACTGA | GGCTAACCGTGCAAATT | 15 | 5 | 7 |
| PEGRNA_RT_7_ | GCACGTGA (SEQ | AACAAACTAA (SEQ ID | | | |
| B | ID NO: 389) | NO: 435) | | | |
| 5′-PEGRNA_RT_8 | GGCCCAGACTGA | GGCCATCTCGTGCAAAT | 15 | 5 | 8 |
| | GCACGTGA (SEQ | TAACAAACTAA (SEQ ID | | | |
| | ID NO: 390) | NO: 436) | | | |
| 5′- | GGCCCAGACTGA | GGTCCTCTGCCATCTCG | 15 | 5 | 15 |
| PEGRNA_RT_15 | GCACGTGA (SEQ | TGCAAATTAACAAACTA | | | |
| | ID NO: 391) | A (SEQ ID NO: 437) | | | |
| 5′- | GGCCCAGACTGA | GGCTTCCTTTCCTCTGC | 15 | 5 | 22 |
| PEGRNA_RT_22 | GCACGTGA (SEQ | CATCTCGTGCAAATTAA | | | |
| | ID NO: 392) | CAAACTAA (SEQ ID NO: | | | |
| | | 438) | | | |

TABLE 2C
3′-extended PEgRNAs

| | | | | RT |
|---|---|---|---|---|
| | | | PBS | TEMPLATE |
| | SPACER | 3′ EXTENSION | LENGTH | LENGTH |
| PEGRNA | SEQUENCE | SEQUENCE | (NT) | (NT) |
| 3′-PEGRNA_10 | GGCCCAGACTGAGC | TCTGCCATCTCGT | 7 | 10 |
| | ACGTGA (SEQ ID NO: | GCTC (SEQ ID NO: | | |
| | 506) | 439) | | |
| 3′- | GGCCCAGACTGAGC | TCTGCCATCTCGT | 7 | 10 |
| PEGRNA_YEAST_ | ACGTGA (SEQ ID NO: | GCTC(SEQ ID NO: | | |
| TTOA | 507) | 440) | | |
| 3′- | GGCCCAGACTGAGC | TCTGCCATCATCG | 7 | 11 |
| PEGRNA_YEAST_ | ACGTGA (SEQ ID NO: | TGCTC(SEQ ID NO: | | |
| +1AINS | 508) | 441) | | |
| 3′- | GGCCCAGACTGAGC | TCTGCCATCCGTG | 7 | 9 |
| PEGRNA_YEAST_ | ACGTGA (SEQ ID NO: | CTC(SEQ ID NO: | | |
| +1TDEL | 509) | 442) | | |

[1660] Tables 3A-3R: Sequences of PEgRNAs and sgRNAs used in mammalian cell experiments. All sequences are shown in 5′ to 3′ orientation. To construct PEgRNAs, spacer sequences listed below were added to the 5′ end of the sgRNA scaffold and the 3′ extensions listed below containing the primer binding site and RT template were added to the 3′ end of the sgRNA scaffold. The sgRNA scaffold sequence is

(SEQ ID NO: 131)
GTTTTAGAGCTAGAAATAGCAAGTTAAAATAAGGCTAGTCCGTTATCAA
CTTGAAAAAGTGGCACCGAGTCGGTGC.

TABLE 3A
FIGS. 39A-39D PEgRNA

| | | | | RT |
|---|---|---|---|---|
| | SPACER SEQUENCE | | PBS | TEMPLATE |
| | (SEQ ID NOS: | 3′ EXTENSION (SEQ ID | LENGTH | LENGTH |
| PEGRNA | 2890-2996) | NOS: 2997-3103) | (NT) | (NT) |
| HEK3_2B- | GGCCCAGACTGAGC | TCTGCCATCTCGTGCTCA | 8 | 10 |
| C_8 | ACGTGA | | | |
| HEK3_2B- | GGCCCAGACTGAGC | TCTGCCATCTCGTGCTCAG | 9 | 10 |
| C_9 | ACGTGA | | | |
| HEK3_2B- | GGCCCAGACTGAGC | TCTGCCATCTCGTGCTCAG | 10 | 10 |
| C_10 | ACGTGA | T | | |
| HEK3_2B- | GGCCCAGACTGAGC | TCTGCCATCTCGTGCTCAG | 11 | 10 |
| C_11 | ACGTGA | TC | | |
| HEK3_2B- | GGCCCAGACTGAGC | TCTGCCATCTCGTGCTCAG | 12 | 10 |
| C_12 | ACGTGA | TCT | | |
| HEK3_2B- | GGCCCAGACTGAGC | TCTGCCATCTCGTGCTCAG | 13 | 10 |
| C_13 | ACGTGA | TCTG | | |
| HEK3_2B- | GGCCCAGACTGAGC | TCTGCCATCTCGTGCTCAG | 14 | 10 |
| C_14 | ACGTGA | TCTGG | | |
| HEK3_2B- | GGCCCAGACTGAGC | TCTGCCATCTCGTGCTCAG | 15 | 10 |
| C_15 | ACGTGA | TCTGGG | | |
| HEK3_2C_16 | GGCCCAGACTGAGC | TCTGCCATCTCGTGCTCAG | 16 | 10 |
| | ACGTGA | TCTGGGC | | |
| HEK3_2C_17 | GGCCCAGACTGAGC | TCTGCCATCTCGTGCTCAG | 17 | 10 |
| | ACGTGA | TCTGGGCC | | |
| EMX1_2C_9 | GAGTCCGAGCAGAA | ATGGGAGCACTTCTTCTTC | 9 | 13 |
| | GAAGAA | TGC | | |
| EMX1_2C_10 | GAGTCCGAGCAGAA | ATGGGAGCACTTCTTCTTC | 10 | 13 |
| | GAAGAA | TGCT | | |
| EMX1_2C_11 | GAGTCCGAGCAGAA | ATGGGAGCACTTCTTCTTC | 11 | 13 |
| | GAAGAA | TGCTC | | |
| EMX1_2C_12 | GAGTCCGAGCAGAA | ATGGGAGCACTTCTTCTTC | 12 | 13 |
| | GAAGAA | TGCTCG | | |
| EMX1_2C_13 | GAGTCCGAGCAGAA | ATGGGAGCACTTCTTCTTC | 13 | 13 |
| | GAAGAA | TGCTCGG | | |
| EMX1_2C_14 | GAGTCCGAGCAGAA | ATGGGAGCACTTCTTCTTC | 14 | 13 |
| | GAAGAA | TGCTCGGA | | |
| EMX1_2C_15 | GAGTCCGAGCAGAA | ATGGGAGCACTTCTTCTTC | 15 | 13 |
| | GAAGAA | TGCTCGGAC | | |
| EMX1_2C_16 | GAGTCCGAGCAGAA | ATGGGAGCACTTCTTCTTC | 16 | 13 |
| | GAAGAA | TGCTCGGACT | | |
| EMX1_2C_17 | GAGTCCGAGCAGAA | ATGGGAGCACTTCTTCTTC | 17 | 13 |
| | GAAGAA | TGCTCGGACTC | | |
| FANCF_2C_ | GGAATCCCTTCTGCA | GGAAAAGCGATCAAGGTG | 8 | 17 |
| 8 | GCACC | CTGCAGA | | |
| FANCF_2C_ | GGAATCCCTTCTGCA | GGAAAAGCGATCAAGGTG | 9 | 17 |
| 9 | GCACC | CTGCAGAA | | |
| FANCF_2C_ | GGAATCCCTTCTGCA | GGAAAAGCGATCAAGGTG | 10 | 17 |
| 10 | GCACC | CTGCAGAAG | | |
| FANCF_2C_ | GGAATCCCTTCTGCA | GGAAAAGCGATCAAGGTG | 11 | 17 |
| 11 | GCACC | CTGCAGAAGG | | |
| FANCF_2C_ | GGAATCCCTTCTGCA | GGAAAAGCGATCAAGGTG | 12 | 17 |
| 12 | GCACC | CTGCAGAAGGG | | |
| FANCF_2C_ | GGAATCCCTTCTGCA | GGAAAAGCGATCAAGGTG | 13 | 17 |
| 13 | GCACC | CTGCAGAAGGGA | | |
| FANCF_2C_ | GGAATCCCTTCTGCA | GGAAAAGCGATCAAGGTG | 14 | 17 |
| 14 | GCACC | CTGCAGAAGGGAT | | |
| FANCF_2C_ | GGAATCCCTTCTGCA | GGAAAAGCGATCAAGGTG | 15 | 17 |
| 15 | GCACC | CTGCAGAAGGGATT | | |
| FANCF_2C_ | GGAATCCCTTCTGCA | GGAAAAGCGATCAAGGTG | 16 | 17 |
| 16 | GCACC | CTGCAGAAGGGATTC | | |
| FANCF_2C_ | GGAATCCCTTCTGCA | GGAAAAGCGATCAAGGTG | 17 | 17 |
| 17 | GCACC | CTGCAGAAGGGATTCC | | |
| RNF2_2C_9 | GTCATCTTAGTCATT | GAACACCTCATGTAATGAC | 9 | 11 |
| | ACCTG | T | | |
| RNF2_2C_10 | GTCATCTTAGTCATT | GAACACCTCATGTAATGAC | 10 | 11 |
| | ACCTG | TA | | |
| RNF2_2C_11 | GTCATCTTAGTCATT | GAACACCTCATGTAATGAC | 11 | 11 |
| | ACCTG | TAA | | |
| RNF2_2C_12 | GTCATCTTAGTCATT | GAACACCTCATGTAATGAC | 12 | 11 |
| | ACCTG | TAAG | | |
| RNF2_2C_13 | GTCATCTTAGTCATT | GAACACCTCATGTAATGAC | 13 | 11 |
| | ACCTG | TAAGA | | |
| RNF2_2C_14 | GTCATCTTAGTCATT | GAACACCTCATGTAATGAC | 14 | 11 |
| | ACCTG | TAAGAT | | |
| RNF2_2C_15 | GTCATCTTAGTCATT | GAACACCTCATGTAATGAC | 15 | 11 |
| | ACCTG | TAAGATG | | |
| RNF2_2C_16 | GTCATCTTAGTCATT | GAACACCTCATGTAATGAC | 16 | 11 |
| | ACCTG | TAAGATGA | | |
| RNF2_2C_17 | GTCATCTTAGTCATT | GAACACCTCATGTAATGAC | 17 | 11 |
| | ACCTG | TAAGATGAC | | |
| HEK4_2C_7 | GGCACTGCGGCTGG | GCTTTAACCCCAACCTCCA | 7 | 13 |
| | AGGTGG | G | | |
| HEK4_2C_8 | GGCACTGCGGCTGG | GCTTTAACCCCAACCTCCA | 8 | 13 |
| | AGGTGG | GC | | |
| HEK4_2C_9 | GGCACTGCGGCTGG | GCTTTAACCCCAACCTCCA | 9 | 13 |
| | AGGTGG | GCC | | |
| HEK4_2C_10 | GGCACTGCGGCTGG | GCTTTAACCCCAACCTCCA | 10 | 13 |
| | AGGTGG | GCCG | | |
| HEK4_2C_11 | GGCACTGCGGCTGG | GCTTTAACCCCAACCTCCA | 11 | 13 |
| | AGGTGG | GCCGC | | |
| HEK4_2C_12 | GGCACTGCGGCTGG | GCTTTAACCCCAACCTCCA | 12 | 13 |
| | AGGTGG | GCCGCA | | |
| HEK4_2C_13 | GGCACTGCGGCTGG | GCTTTAACCCCAACCTCCA | 13 | 13 |
| | AGGTGG | GCCGCAG | | |
| HEK4_2C_14 | GGCACTGCGGCTGG | GCTTTAACCCCAACCTCCA | 14 | 13 |
| | AGGTGG | GCCGCAGT | | |
| HEK4_2C_15 | GGCACTGCGGCTGG | GCTTTAACCCCAACCTCCA | 15 | 13 |
| | AGGTGG | GCCGCAGTG | | |
| HEK3_2C_ | GGCCCAGACTGAGC | TCTGCCATCCGTGCTCAGT | 13 | 10 |
| 1TDEL | ACGTGA | CTG | | |
| HEK3_2C_ | GGCCCAGACTGAGC | TCTGCCATCATCGTGCTCA | 13 | 10 |
| 1AINS | ACGTGA | GTCTG | | |
| HEK3_2C_ | GGCCCAGACTGAGC | TCTGCCATCAAAGCGTGCT | 13 | 10 |
| 1CTTINS | ACGTGA | CAGTCTG | | |
| HEK3_2D_10 | GGCCCAGACTGAGC | TCTGCCATCTCGTGCTCAG | 13 | 10 |
| | ACGTGA | TCTG | | |
| HEK3_2D_11 | GGCCCAGACTGAGC | CTCTGCCATCTCGTGCTCA | 13 | 11 |
| | ACGTGA | GTCTG | | |
| HEK3_2D_12 | GGCCCAGACTGAGC | CCTCTGCCATCTCGTGCTC | 13 | 12 |
| | ACGTGA | AGTCTG | | |
| HEK3_2D_13 | GGCCCAGACTGAGC | TCCTCTGCCATCTCGTGCTC | 13 | 13 |
| | ACGTGA | AGTCTG | | |
| HEK3_2D_14 | GGCCCAGACTGAGC | TTCCTCTGCCATCTCGTGCT | 13 | 14 |
| | ACGTGA | CAGTCTG | | |
| HEK3_2D_15 | GGCCCAGACTGAGC | TTTCCTCTGCCATCTCGTGC | 13 | 15 |
| | ACGTGA | TCAGTCTG | | |
| HEK3_2D_16 | GGCCCAGACTGAGC | CTTTCCTCTGCCATCTCGTG | 13 | 16 |
| | ACGTGA | CTCAGTCTG | | |
| HEK3_2D_17 | GGCCCAGACTGAGC | CCTTTCCTCTGCCATCTCGT | 13 | 17 |
| | ACGTGA | GCTCAGTCTG | | |
| HEK3_2D_18 | GGCCCAGACTGAGC | TCCTTTCCTCTGCCATCTCG | 13 | 18 |
| | ACGTGA | TGCTCAGTCTG | | |
| HEK3_2D_19 | GGCCCAGACTGAGC | TTCCTTTCCTCTGCCATCTC | 13 | 19 |
| | ACGTGA | GTGCTCAGTCTG | | |
| HEK3_2D_20 | GGCCCAGACTGAGC | CTTCCTTTCCTCTGCCATCT | 13 | 20 |
| | ACGTGA | CGTGCTCAGTCTG | | |
| EMX1_2D_10 | GAGTCCGAGCAGAA | GGAGCCCTTGTTCTTCTGC | 13 | 10 |
| | GAAGAA | TCGG | | |
| EMX1_2D_11 | GAGTCCGAGCAGAA | GGGAGCCCTTGTTCTTCTG | 13 | 11 |
| | GAAGAA | CTCGG | | |
| EMX1_2D_12 | GAGTCCGAGCAGAA | TGGGAGCCCTTGTTCTTCT | 13 | 12 |
| | GAAGAA | GCTCGG | | |
| EMX1_2D_13 | GAGTCCGAGCAGAA | ATGGGAGCCCTTGTTCTTC | 13 | 13 |
| | GAAGAA | TGCTCGG | | |
| EMX1_2D_14 | GAGTCCGAGCAGAA | GATGGGAGCCCTTGTTCTT | 13 | 14 |
| | GAAGAA | CTGCTCGG | | |
| EMX1_2D_15 | GAGTCCGAGCAGAA | TGATGGGAGCCCTTGTTCT | 13 | 15 |
| | GAAGAA | TCTGCTCGG | | |
| EMX1_2D_16 | GAGTCCGAGCAGAA | GTGATGGGAGCCCTTGTTC | 13 | 16 |
| | GAAGAA | TTCTGCTCGG | | |
| EMX1_2D_17 | GAGTCCGAGCAGAA | TGTGATGGGAGCCCTTGTT | 13 | 17 |
| | GAAGAA | CTTCTGCTCGG | | |
| EMX1_2D_18 | GAGTCCGAGCAGAA | ATGTGATGGGAGCCCTTGT | 13 | 18 |
| | GAAGAA | TCTTCTGCTCGG | | |
| EMX1_2D_19 | GAGTCCGAGCAGAA | GATGTGATGGGAGCCCTTG | 13 | 19 |
| | GAAGAA | TTCTTCTGCTCGG | | |
| EMX1_2D_20 | GAGTCCGAGCAGAA | TGATGTGATGGGAGCCCTT | 13 | 20 |
| | GAAGAA | GTTCTTCTGCTCGG | | |
| FANCF_2D_ | GGAATCCCTTCTGCA | CGATCAAGGTGCTGCAGAA | 13 | 10 |
| 10 | GCACC | GGGA | | |
| FANCF_2D_ | GGAATCCCTTCTGCA | GCGATCAAGGTGCTGCAGA | 13 | 11 |
| 11 | GCACC | AGGGA | | |
| FANCF_2D_ | GGAATCCCTTCTGCA | AGCGATCAAGGTGCTGCAG | 13 | 12 |
| 12 | GCACC | AAGGGA | | |
| FANCF_2D_ | GGAATCCCTTCTGCA | AAGCGATCAAGGTGCTGCA | 13 | 13 |
| 13 | GCACC | GAAGGGA | | |
| FANCF_2D_ | GGAATCCCTTCTGCA | AAAGCGATCAAGGTGCTGC | 13 | 14 |
| 14 | GCACC | AGAAGGGA | | |
| FANCF_2D_ | GGAATCCCTTCTGCA | AAAAGCGATCAAGGTGCT | 13 | 15 |
| 15 | GCACC | GCAGAAGGGA | | |
| FANCF_2D_ | GGAATCCCTTCTGCA | GAAAAGCGATCAAGGTGC | 13 | 16 |
| 16 | GCACC | TGCAGAAGGGA | | |
| FANCF_2D_ | GGAATCCCTTCTGCA | GGAAAAGCGATCAAGGTG | 13 | 17 |
| 17 | GCACC | CTGCAGAAGGGA | | |
| FANCF_2D_ | GGAATCCCTTCTGCA | CGGAAAAGCGATCAAGGT | 13 | 18 |
| 18 | GCACC | GCTGCAGAAGGGA | | |
| FANCF_2D_ | GGAATCCCTTCTGCA | TCGGAAAAGCGATCAAGG | 13 | 19 |
| 19 | GCACC | TGCTGCAGAAGGGA | | |
| FANCF_2D_ | GGAATCCCTTCTGCA | CTCGGAAAAGCGATCAAG | 13 | 20 |
| 20 | GCACC | GTGCTGCAGAAGGGA | | |
| RNF2_2D_10 | GTCATCTTAGTCATT | AACACCTCATGTAATGACT | 15 | 10 |
| | ACCTG | AAGATG | | |
| RNF2_2D_11 | GTCATCTTAGTCATT | GAACACCTCATGTAATGAC | 15 | 11 |
| | ACCTG | TAAGATG | | |
| RNF2_2D_12 | GTCATCTTAGTCATT | CGAACACCTCATGTAATGA | 15 | 12 |
| | ACCTG | CTAAGATG | | |
| RNF2_2D_13 | GTCATCTTAGTCATT | ACGAACACCTCATGTAATG | 15 | 13 |
| | ACCTG | ACTAAGATG | | |
| RNF2_2D_14 | GTCATCTTAGTCATT | AACGAACACCTCATGTAAT | 15 | 14 |
| | ACCTG | GACTAAGATG | | |
| RNF2_2D_15 | GTCATCTTAGTCATT | CAACGAACACCTCATGTAA | 15 | 15 |
| | ACCTG | TGACTAAGATG | | |
| RNF2_2D_16 | GTCATCTTAGTCATT | ACAACGAACACCTCATGTA | 15 | 16 |
| | ACCTG | ATGACTAAGATG | | |
| RNF2_2D_17 | GTCATCTTAGTCATT | TACAACGAACACCTCATGT | 15 | 17 |
| | ACCTG | AATGACTAAGATG | | |
| RNF2_2D_18 | GTCATCTTAGTCATT | TTACAACGAACACCTCATG | 15 | 18 |
| | ACCTG | TAATGACTAAGATG | | |
| RNF2_2D_19 | GTCATCTTAGTCATT | GTTACAACGAACACCTCAT | 15 | 19 |
| | ACCTG | GTAATGACTAAGATG | | |
| RNF2_2D_20 | GTCATCTTAGTCATT | AGTTACAACGAACACCTCA | 15 | 20 |
| | ACCTG | TGTAATGACTAAGATG | | |
| HEK4_2D_7 | GGCACTGCGGCTGG | ACCCCAACCTCCAGCCGC | 11 | 7 |
| | AGGTGG | | | |
| HEK4_2D_8 | GGCACTGCGGCTGG | AACCCCAACCTCCAGCCGC | 11 | 8 |
| | AGGTGG | | | |
| HEK4_2D_9 | GGCACTGCGGCTGG | TAACCCCAACCTCCAGCCG | 11 | 9 |
| | AGGTGG | C | | |
| HEK4_2D_10 | GGCACTGCGGCTGG | TTAACCCCAACCTCCAGCC | 11 | 10 |
| | AGGTGG | GC | | |
| HEK4_2D_11 | GGCACTGCGGCTGG | TTTAACCCCAACCTCCAGC | 11 | 11 |
| | AGGTGG | CGC | | |
| HEK4_2D_12 | GGCACTGCGGCTGG | CTTTAACCCCAACCTCCAG | 11 | 12 |
| | AGGTGG | CCGC | | |
| HEK4_2D_13 | GGCACTGCGGCTGG | GCTTTAACCCCAACCTCCA | 11 | 13 |
| | AGGTGG | GCCGC | | |
| HEK4_2D_14 | GGCACTGCGGCTGG | CGCTTTAACCCCAACCTCC | 11 | 14 |
| | AGGTGG | AGCCGC | | |
| HEK4_2D_15 | GGCACTGCGGCTGG | CCGCTTTAACCCCAACCTC | 11 | 15 |
| | AGGTGG | CAGCCGC | | |
| HEK4_2D_16 | GGCACTGCGGCTGG | TCCGCTTTAACCCCAACCT | 11 | 16 |
| | AGGTGG | CCAGCCGC | | |
| HEK4_2D_17 | GGCACTGCGGCTGG | CTCCGCTTTAACCCCAACC | 11 | 17 |
| | AGGTGG | TCCAGCCGC | | |
| HEK4_2D_18 | GGCACTGCGGCTGG | CTCCGCTTTAACCCCAACC | 11 | 18 |
| | AGGTGG | TCCAGCCGC | | |
| HEK4_2D_19 | GGCACTGCGGCTGG | CTCCGCTTTAACCCCAACC | 11 | 19 |
| | AGGTGG | TCCAGCCGC | | |

TABLE 3B
FIGS. 40A-40C PEgRNA

| | | | | RT |
|---|---|---|---|---|
| | | | PBS | TEMPLATE |
| | SPACER SEQUENCE | 3′ EXTENSION (SEQ | LENGTH | LENGTH |
| PEGRNA | 3104-3112) | ID NOS: 3113-3121) | (NT) | (NT) |
| RNF2_3B | GTCATCTTAGTCATT | AACGAACACCTCATGTAAT | 15 | 14 |
| | ACCTG | GACTAAGATG | | |
| EMX1_3B | GAGTCCGAGCAGAA | ATGGGAGCACTTCTTCTTC | 15 | 13 |
| | GAAGAA | TGCTCGGAC | | |
| FANCF_3B | GGAATCCCTTCTGCA | GGAAAAGCGATCAAGGTG | 15 | 17 |
| | GCACC | CTGCAGAAGGGATT | | |
| HE3_3B | GGCCCAGACTGAGC | TCTGCCATGACGTGCTCAG | 13 | 10 |
| | ACGTGA | TCTG | | |
| HEK4_3B | GGCACTGCGGCTGG | TTAACCCCAACCTCCAGCC | 9 | 10 |
| | AGGTGG | | | |
| RNF2_3C_ | GTCATCTTAGTCATT | AACGAACACCGCAGGTAA | 15 | 14 |
| 4ATOC | ACCTG | TGACTAAGATG | | |
| RNF2_3C_ | GTCATCTTAGTCATT | AACGAACACCCCAGGTAA | 15 | 14 |
| 4ATOG | ACCTG | TGACTAAGATG | | |
| FANCF_3C_ | GGAATCCCTTCTGCA | GGAAAAGCGATCAAGGTG | 13 | 17 |
| 5GTOT | GCACC | CTGCAGAAGGGA | | |
| FANCF_3C_ | GGAATCCCTTCTGCA | GGAAAAGCGAGCCAGGTG | 14 | 17 |
| 7ATOC | GCACC | CTGCAGAAGGGAT | | |

TABLE 3C
FIGS. 40A-40C nicking sgRNA sequences

| | | SEQ |
|---|---|---|
| NICKING SGRNA | SPACER SEQUENCE | ID NO: |
| RNF2_2B_+41 | GTCAACCATTAAGCAAAACAT | 3122 |
| RNF2_2B_+67 | GTCTCAGGCTGTGCAGACAAA | 3123 |
| EMX1_2B_-116 | GGGGCACAGATGAGAAACTC | 3124 |
| EMX1_2B_-57 | GCCGTTTGTACTTTGTCCTC | 3125 |
| EMX1_2B_+14 | GCGCCACCGGTTGATGTGAT | 3126 |
| EMX1_2B_+27 | GCTTCGTGGCAATGCGCCAC | 3127 |
| EMX1_2B_+53 | GACATCGATGTCCTCCCCAT | 3128 |
| EMX1_2B_+80 | GTGGTTGCCCACCCTAGTCAT | 3129 |
| FANCF_2B_-78 | GCGACTCTCTGCGTACTGAT | 3130 |
| FANCF_2B_-50 | GCCCTACTTCCGCTTTCACCT | 3131 |
| FANCF_2B_-27 | GGATTCCATGAGGTGCGCGA | 3132 |
| FANCF_2B_-17 | GCTGCAGAAGGGATTCCATG | 3133 |
| FANCF_2B_+21 | GCTTGAGACCGCCAGAAGCT | 3134 |
| FANCF_2B_+48 | GGGGTCCCAGGTGCTGACGT | 3135 |
| HEK3_2B_-108 | GCAGAAATAGACTAATTGCA | 3136 |
| HEK3_2B_-38 | GGATTGACCCAGGCCAGGGC | 3137 |
| HEK3_2B_+26 | GACGCCCTCTGGAGGAAGCA | 3138 |
| HEK3_2B_+37 | GCTGTCCTGCGACGCCCTC | 3139 |
| HEK3_2B_+63 | GCACATACTAGCCCCTGTCT | 3140 |
| HEK3_2B_+90 | GTCAACCAGTATCCCGGTGC | 3141 |
| HEK4_2B_-95 | TCCCTTCCTTCCACCCAGCC | 3142 |
| HEK4_2B_-51 | CCCTGCCTGTCATCCTGCTT | 3143 |
| HEK4_2B_-26 | GCAGTGCCACCGGGGCGCCG | 3144 |
| HEK4_2B_+52 | GCGGGGGCTCAGAGAGGGCA | 3145 |
| HEK4_2B_+74 | GAGACACACACACAGGCCTGG | 3146 |
| RNF2_2C_+41 | GTCAACCATTAAGCAAAACAT | 3147 |
| RNF2_2C_4ATOC_+5 | GTGAGTTACAACGAACACCGC | 3148 |
| RNF2_2C_4ATOG_+5 | GTGAGTTACAACGAACACCCC | 3149 |
| FANCF_2C_+48 | GGGGTCCCAGGTGCTGACGT | 3150 |
| FANCF_2C_5GTOT_+7 | GAAGCTCGGAAAAGCGATCA | 3151 |
| FANCF_2C_7ATOC_+7 | GAAGCTCGGAAAAGCGAGCC | 3152 |
| HEK3_2C_+90 | GTCAACCAGTATCCCGGTGC | 3153 |

TABLE 3D
FIGS. 41A-41K PEgRNA

| | | | | RT |
|---|---|---|---|---|
| | | | PBS | TEMPLATE |
| | SPACER SEQUENCE | 3′ EXTENSION (SEQ | LENGTH | LENGTH |
| PEGRNA | (SEQ ID NO: 3154-3304) | ID NO: 3305-3455) | (NT) | (NT) |
| HEK3_4A_ | GGCCCAGACTGAGCA | TCTGCCATCTCGTGCTCAGT | 13 | 10 |
| 1TTOA | CGTGA | CTG | | |
| HEK3_4A_ | GGCCCAGACTGAGCA | TCTGCCATCGCGTGCTCAGT | 13 | 10 |
| 1TTOC | CGTGA | CTG | | |
| HEK3_4A_ | GGCCCAGACTGAGCA | TCTGCCATCGCGTGCTCAGT | 13 | 10 |
| 1TTOG | CGTGA | CTG | | |
| HEK3_4A_ | GGCCCAGACTGAGCA | TCTGCCATTACGTGCTCAGT | 13 | 10 |
| 2GTOA | CGTGA | CTG | | |
| HEK3_4A_ | GGCCCAGACTGAGCA | TCTGCCATGACGTGCTCAGT | 13 | 10 |
| 2GTOC | CGTGA | CTG | | |
| HEK3_4A_ | GGCCCAGACTGAGCA | TCTGCCATAACGTGCTCAGT | 13 | 10 |
| 2GTOT | CGTGA | CTG | | |
| HEK3_4A_ | GGCCCAGACTGAGCA | TCTGCCAGCACGTGCTCAG | 13 | 10 |
| 3ATOC | CGTGA | TCTG | | |
| HEK3_4A_ | GGCCCAGACTGAGCA | TCTGCCACCACGTGCTCAG | 13 | 10 |
| 3ATOG | CGTGA | TCTG | | |
| HEK3_4A_ | GGCCCAGACTGAGCA | TCTGCCAACACGTGCTCAG | 13 | 10 |
| 3ATOT | CGTGA | TCTG | | |
| HEK3_4A_ | GGCCCAGACTGAGCA | TCTGCCTTCACGTGCTCAGT | 13 | 10 |
| 4TTOA | CGTGA | CTG | | |
| HEK3_4A_ | GGCCCAGACTGAGCA | TCTGCCGTCACGTGCTCAG | 13 | 10 |
| 4TTOC | CGTGA | TCTG | | |
| HEK3_4A_ | GGCCCAGACTGAGCA | TCTGCCCTCACGTGCTCAGT | 13 | 10 |
| 4TTOG | CGTGA | CTG | | |
| HEK3_4A_ | GGCCCAGACTGAGCA | TCTGCTATCACGTGCTCAGT | 13 | 10 |
| 5GTOA | CGTGA | CTG | | |
| HEK3_4A_ | GGCCCAGACTGAGCA | TCTGCGATCACGTGCTCAGT | 13 | 10 |
| 5GTOC | CGTGA | CTG | | |
| HEK3_4A_ | GGCCCAGACTGAGCA | TCTGCAATCACGTGCTCAGT | 13 | 10 |
| 5GTOT | CGTGA | CTG | | |
| HEK3_4A_ | GGCCCAGACTGAGCA | TCTGTCATCACGTGCTCAGT | 13 | 10 |
| 6GTOA | CGTGA | CTG | | |
| HEK3_4A_ | GGCCCAGACTGAGCA | TCTGGCATCACGTGCTCAGT | 13 | 10 |
| 6GTOC | CGTGA | CTG | | |
| HEK3_4A_ | GGCCCAGACTGAGCA | TCTGACATCACGTGCTCAGT | 13 | 10 |
| 6GTOT | CGTGA | CTG | | |
| HEK3_4A_ | GGCCCAGACTGAGCA | TCTTCCATCACGTGCTCAGT | 13 | 10 |
| 7CTOA | CGTGA | CTG | | |
| HEK3_4A_ | GGCCCAGACTGAGCA | TCTCCCATCACGTGCTCAGT | 13 | 10 |
| 7CTOG | CGTGA | CTG | | |
| HEK3_4A_ | GGCCCAGACTGAGCA | TCTACCATCACGTGCTCAGT | 13 | 10 |
| 7CTOT | CGTGA | CTG | | |
| HEK3_4A_ | GGCCCAGACTGAGCA | TCGGCCATCACGTGCTCAG | 13 | 10 |
| 8ATOC | CGTGA | TCTG | | |
| HEK3_4A_ | GGCCCAGACTGAGCA | TCCGCCATCACGTGCTCAGT | 13 | 10 |
| 8ATOG | CGTGA | CTG | | |
| HEK3_4A_ | GGCCCAGACTGAGCA | TCAGCCATCACGTGCTCAG | 13 | 10 |
| 8ATOT | CGTGA | TCTG | | |
| HEK3_4B_ | GGCCCAGACTGAGCA | TGGAGGAAGCAGGGCTTCC | 13 | 34 |
| 1TTOA | CGTGA | TTTCCTCTGCCATCTCGTGC | | |
| | | TCAGTCTG | | |
| HEK3_4B_ | GGCCCAGACTGAGCA | TGGAGGAAGCAGGGCTTCC | 13 | 34 |
| 12GTOC | CGTGA | TTTGCTCTGCCATCACGTGC | | |
| | | TCAGTCTG | | |
| HEK3_4B_ | GGCCCAGACTGAGCA | TGGAGGAAGCAGGGCTTCC | 13 | 34 |
| 14ATOT | CGTGA | TATCCTCTGCCATCACGTGC | | |
| | | TCAGTCTG | | |
| HEK3_4B_ | GGCCCAGACTGAGCA | TGGAGGAAGCAGGGCTTCC | 13 | 34 |
| 17GTOC | CGTGA | TTTCCTCTGCCATCACGTGC | | |
| | | TCAGTCTG | | |
| HEK3_4B_ | GGCCCAGACTGAGCA | TGGAGGAAGCAGGGCTTCC | 13 | 34 |
| 20GTOC | CGTGA | TTTCCTCTGCCATCACGTGC | | |
| | | TCAGTCTG | | |
| HEK3_4B_ | GGCCCAGACTGAGCA | TGGAGGAAGCAGGGCTTCC | 13 | 34 |
| 23CTOG | CGTGA | TTTCCTCTGCCATCACGTGC | | |
| | | TCAGTCTG | | |
| HEK3_4B_ | GGCCCAGACTGAGCA | TGGAGGAAGCTGGGCTTCC | 13 | 34 |
| 24TTOA | CGTGA | TTTCCTCTGCCATCACGTGC | | |
| | | TCAGTCTG | | |
| HEK3_4B_ | GGCCCAGACTGAGCA | TGGAGGAACCAGGGCTTCC | 13 | 34 |
| 26CTOG | CGTGA | TTTCCTCTGCCATCACGTGC | | |
| | | TCAGTCTG | | |
| HEK3_4B_ | GGCCCAGACTGAGCA | TGGACGAAGCAGGGCTTCC | 13 | 34 |
| 30CTOG | CGTGA | TTTCCTCTGCCATCACGTGC | | |
| | | TCAGTCTG | | |
| HEK3_4B_ | GGCCCAGACTGAGCA | TCGAGGAAGCAGGGCTTCC | 13 | 34 |
| 33CTOG | CGTGA | TTTCCTCTGCCATCACGTGC | | |
| | | TCAGTCTG | | |
| RNF2_4C_ | GTCATCTTAGTCATTA | AACGAACACCTCATGTAAT | 15 | 14 |
| 1CTOA | CCTG | GACTAAGATG | | |
| RNF2_4C_ | GTCATCTTAGTCATTA | AACGAACACCTCACGTAAT | 15 | 14 |
| 1CTOG | CCTG | GACTAAGATG | | |
| RNF2_4C_ | GTCATCTTAGTCATTA | AACGAACACCTCAAGTAAT | 15 | 14 |
| 1CTOT | CCTG | GACTAAGATG | | |
| RNF2_4C_ | GTCATCTTAGTCATTA | AACGAACACCTCTGGTAAT | 15 | 14 |
| 2TTOA | CCTG | GACTAAGATG | | |
| RNF2_4C_ | GTCATCTTAGTCATTA | AACGAACACCTCCGGTAAT | 15 | 14 |
| 2TTOG | CCTG | GACTAAGATG | | |
| RNF2_4C_ | GTCATCTTAGTCATTA | AACGAACACCTGAGGTAAT | 15 | 14 |
| 3GTOC | CCTG | GACTAAGATG | | |
| RNF2_4C_ | GTCATCTTAGTCATTA | AACGAACACCGCAGGTAAT | 15 | 14 |
| 4ATOC | CCTG | GACTAAGATG | | |
| RNF2_4C_ | GTCATCTTAGTCATTA | AACGAACACCACAGGTAAT | 15 | 14 |
| 4ATOT | CCTG | GACTAAGATG | | |
| RNF2_4C_ | GTCATCTTAGTCATTA | AACGAACACCCCAGGTAAT | 15 | 14 |
| 4ATOG | CCTG | GACTAAGATG | | |
| RNF2_4C_ | GTCATCTTAGTCATTA | AACGAACACATCAGGTAAT | 15 | 14 |
| 5GTOT | CCTG | GACTAAGATG | | |
| RNF2_4C_ | GTCATCTTAGTCATTA | AACGAACATCTCAGGTAAT | 15 | 14 |
| 6GTOA | CCTG | GACTAAGATG | | |
| RNF2_4C_ | GTCATCTTAGTCATTA | AACGAACGCCTCAGGTAAT | 15 | 14 |
| 7TTOC | CCTG | GACTAAGATG | | |
| FANCF_4D_ | GGAATCCCTTCTGCA | GGAAAAGCGATCCAGGCGC | 14 | 17 |
| 1ATOG | GCACC | TGCAGAAGGGAT | | |
| FANCF_4D_ | GGAATCCCTTCTGCA | GGAAAAGCGATCCAGGAGC | 14 | 17 |
| 1ATOT | GCACC | TGCAGAAGGGAT | | |
| FANCF_4D_ | GGAATCCCTTCTGCA | GGAAAAGCGATCCAGTTGC | 14 | 17 |
| 2CTOA | GCACC | TGCAGAAGGGAT | | |
| FANCF_4D_ | GGAATCCCTTCTGCA | GGAAAAGCGATCCACGTGC | 14 | 17 |
| 3CTOG | GCACC | TGCAGAAGGGAT | | |
| FANCF_4D_ | GGAATCCCTTCTGCA | GGAAAAGCGATCCAAGTGC | 14 | 17 |
| 3CTOT | GCACC | TGCAGAAGGGAT | | |
| FANCF_4D_ | GGAATCCCTTCTGCA | GGAAAAGCGATCCTGGTGC | 14 | 17 |
| 4TTOA | GCACC | TGCAGAAGGGAT | | |
| FANCF_4D_ | GGAATCCCTTCTGCA | GGAAAAGCGATCCCGGTGC | 14 | 17 |
| 4TTOG | GCACC | TGCAGAAGGGAT | | |
| FANCF_4D_ | GGAATCCCTTCTGCA | GGAAAAGCGATCTAGGTGC | 14 | 17 |
| 5GTOA | GCACC | TGCAGAAGGGAT | | |
| FANCF_4D_ | GGAATCCCTTCTGCA | GGAAAAGCGATGCAGGTGC | 14 | 17 |
| 6GTOC | GCACC | TGCAGAAGGGAT | | |
| FANCF_4D_ | GGAATCCCTTCTGCA | GGAAAAGCGAGCCAGGTG | 14 | 17 |
| 7ATOC | GCACC | CTGCAGAAGGGAT | | |
| FANCF_4D_ | GGAATCCCTTCTGCA | GGAAAAGCGGTCCAGGTGC | 14 | 17 |
| 8TTOC | GCACC | TGCAGAAGGGAT | | |
| FANCF_4D_ | GGAATCCCTTCTGCA | GGAAAAGAGATCCAGGTGC | 14 | 17 |
| 10GTOT | GCACC | TGCAGAAGGGAT | | |
| EMX1_4E_ | GAGTCCGAGCAGAA | GTGATGGGAGCCCTGCTTC | 14 | 16 |
| 2ATOC | GAAGAA | TTCTGCTCGGA | | |
| EMX1_4E_ | GAGTCCGAGCAGAA | GTGATGGGAGCCCTACTTCT | 14 | 16 |
| 2ATOT | GAAGAA | TCTGCTCGGA | | |
| EMX1_4E_ | GAGTCCGAGCAGAA | GTGATGGGAGCCCCTCTTCT | 14 | 16 |
| 3ATOG | GAAGAA | TCTGCTCGGA | | |
| EMX1_4E_ | GAGTCCGAGCAGAA | GTGATGGGAGCCGTTCTTCT | 14 | 16 |
| 4GTOC | GAAGAA | TCTGCTCGGA | | |
| EMX1_4E_ | GAGTCCGAGCAGAA | GTGATGGGAGCTCTTCTTCT | 14 | 16 |
| 5GTOA | GAAGAA | TCTGCTCGGA | | |
| EMX1_4E_ | GAGTCCGAGCAGAA | GTGATGGGAGCACTTCTTCT | 14 | 16 |
| 5GTOT | GAAGAA | TCTGCTCGGA | | |
| EMX1_4E_ | GAGTCCGAGCAGAA | GTGATGGGATCCCTTCTTCT | 14 | 16 |
| 7CTOA | GAAGAA | TCTGCTCGGA | | |
| EMX1_4E_ | GAGTCCGAGCAGAA | GTGATGGGTGCCCTTCTTCT | 14 | 16 |
| 8TTOA | GAAGAA | TCTGCTCGGA | | |
| EMX1_4E_ | GAGTCCGAGCAGAA | GTGATGGGGGCCCTTCTTCT | 14 | 16 |
| 8TTOC | GAAGAA | TCTGCTCGGA | | |
| EMX1_4E_ | GAGTCCGAGCAGAA | GTGATGGGCGCCCTTCTTCT | 14 | 16 |
| 8TTOG | GAAGAA | TCTGCTCGGA | | |
| EMX1_4E_ | GAGTCCGAGCAGAA | GTGATGGCAGCCCTTCTTCT | 14 | 16 |
| 9CTOG | GAAGAA | TCTGCTCGGA | | |
| EMX1_4E_ | GAGTCCGAGCAGAA | GTGATGGAAGCCCTTCTTCT | 14 | 16 |
| 9CTOT | GAAGAA | TCTGCTCGGA | | |
| RUNX1_4F_ | GCATTTTCAGGAGGA | TGTCTGAAGCCATCTCTTCC | 15 | 15 |
| 1CTOA | AGCGA | TCCTGAAAAT | | |
| RUNX1_4F_ | GCATTTTCAGGAGGA | TGTCTGAAGCCATCCCTTCC | 15 | 15 |
| 1CTOG | AGCGA | TCCTGAAAAT | | |
| RUNX1_4F_ | GCATTTTCAGGAGGA | TGTCTGAAGCCATCACTTCC | 15 | 15 |
| 1CTOT | AGCGA | TCCTGAAAAT | | |
| RUNX1_4F_ | GCATTTTCAGGAGGA | TGTCTGAAGCCATTGCTTCC | 15 | 15 |
| 2GTOA | AGCGA | TCCTGAAAAT | | |
| RUNX1_4F_ | GCATTTTCAGGAGGA | TGTCTGAAGCCAGCGCTTC | 15 | 15 |
| 3ATOC | AGCGA | CTCCTGAAAAT | | |
| RUNX1_4F_ | GCATTTTCAGGAGGA | TGTCTGAAGCCACCGCTTC | 15 | 15 |
| 3ATOG | AGCGA | CTCCTGAAAAT | | |
| RUNX1_4F_ | GCATTTTCAGGAGGA | TGTCTGAAGCCAACGCTTC | 15 | 15 |
| 3ATOT | AGCGA | CTCCTGAAAAT | | |
| RUNX1_4F_ | GCATTTTCAGGAGGA | TGTCTGAAGCCTTCGCTTCC | 15 | 15 |
| 4TTOA | AGCGA | TCCTGAAAAT | | |
| RUNX1_4F_ | GCATTTTCAGGAGGA | TGTCTGAAGCCGTCGCTTC | 15 | 15 |
| 4TTOC | AGCGA | CTCCTGAAAAT | | |
| RUNX1_4F_ | GCATTTTCAGGAGGA | TGTCTGAAGCCCTCGCTTCC | 15 | 15 |
| 4TTOG | AGCGA | TCCTGAAAAT | | |
| RUNX1_4F_ | GCATTTTCAGGAGGA | TGTCTGAAGCAATCGCTTCC | 15 | 15 |
| 5GTOT | AGCGA | TCCTGAAAAT | | |
| RUNX1_4F_ | GCATTTTCAGGAGGA | TGTCTGAAGGCATCGCTTCC | 15 | 15 |
| 6GTOC | AGCGA | TCCTGAAAAT | | |
| VEGFA_4G_ | GATGTCTGCAGGCCA | AATGTGCCATCTGGAGCCCT | 13 | 22 |
| 1TTOA | GATGA | CTTCTGGCCTGCAGA | | |
| VEGFA_4G_ | GATGTCTGCAGGCCA | AATGTGCCATCTGGAGCCCT | 13 | 22 |
| 1TTOC | GATGA | CGTCTGGCCTGCAGA | | |
| VEGFA_4G_ | GATGTCTGCAGGCCA | AATGTGCCATCTGGAGCCCT | 13 | 22 |
| 1TTOG | GATGA | CCTCTGGCCTGCAGA | | |
| VEGFA_4G_ | GATGTCTGCAGGCCA | AATGTGCCATCTGGAGCCCT | 13 | 22 |
| 2GTOA | GATGA | TATCTGGCCTGCAGA | | |
| VEGFA_4G_ | GATGTCTGCAGGCCA | AATGTGCCATCTGGAGCCC | 13 | 22 |
| 3ATOC | GATGA | GCATCTGGCCTGCAGA | | |
| VEGFA_4G_ | GATGTCTGCAGGCCA | AATGTGCCATCTGGAGCCC | 13 | 22 |
| 3ATOG | GATGA | CCATCTGGCCTGCAGA | | |
| VEGFA_4G_ | GATGTCTGCAGGCCA | AATGTGCCATCTGGAGCCC | 13 | 22 |
| 3ATOT | GATGA | ACATCTGGCCTGCAGA | | |
| VEGFA_4G_ | GATGTCTGCAGGCCA | AATGTGCCATCTGGAGCAC | 13 | 22 |
| 5GTOT | GATGA | TCATCTGGCCTGCAGA | | |
| VEGFA_4G_ | GATGTCTGCAGGCCA | AATGTGCCATCTGGAGGCC | 13 | 22 |
| 6GTOC | GATGA | TCATCTGGCCTGCAGA | | |
| VEGFA_4G_ | GATGTCTGCAGGCCA | AATGTGCCATCTGGATCCCT | 13 | 22 |
| 7CTOA | GATGA | CATCTGGCCTGCAGA | | |
| VEGFA_4G_ | GATGTCTGCAGGCCA | AATGTGCCATCTGGAACCCT | 13 | 22 |
| 7CTOT | GATGA | CATCTGGCCTGCAGA | | |
| VEGFA_4G_ | GATGTCTGCAGGCCA | AATGTGCCATCTGCAGCCCT | 13 | 22 |
| 9CTOG | GATGA | CATCTGGCCTGCAGA | | |
| DNMT1_4H_ | GATTCCTGGTGCCAG | GTCACCCCTGGTTCTGGCA | 13 | 11 |
| 1ATOC | AAACA | CCAGG | | |
| DNMT1_4H_ | GATTCCTGGTGCCAG | GTCACCCCTGCTTCTGGCA | 13 | 11 |
| 1ATOG | AAACA | CCAGG | | |
| DNMT1_4H_ | GATTCCTGGTGCCAG | GTCACCCCTTTTTCTGGCAC | 13 | 11 |
| 2CTOA | AAACA | CAGG | | |
| DNMT1_4H_ | GATTCCTGGTGCCAG | GTCACCCCTCTTTCTGGCAC | 13 | 11 |
| 2CTOG | AAACA | CAGG | | |
| DNMT1_4H_ | GATTCCTGGTGCCAG | GTCACCCCTATTTCTGGCAC | 13 | 11 |
| 2CTOT | AAACA | CAGG | | |
| DNMT1_4H_ | GATTCCTGGTGCCAG | GTCACCCCAGTTTCTGGCA | 13 | 11 |
| 3ATOT | AAACA | CCAGG | | |
| DNMT1_4H_ | GATTCCTGGTGCCAG | GTCACCCTTGTTTCTGGCAC | 13 | 11 |
| 4GTOA | AAACA | CAGG | | |
| DNMT1_4H_ | GATTCCTGGTGCCAG | GTCACCACTGTTTCTGGCA | 13 | 11 |
| 5GTOT | AAACA | CCAGG | | |
| DNMT1_4H_ | GATTCCTGGTGCCAG | GTCACGCCTGTTTCTGGCA | 13 | 11 |
| 6GTOC | AAACA | CCAGG | | |
| DNMT1_4H_ | GATTCCTGGTGCCAG | GCCCTCCCGTCTCCCCTGTT | 13 | 19 |
| 8TTOA | AAACA | TCTGGCACCAGG | | |
| DNMT1_4H_ | GATTCCTGGTGCCAG | GCCCTCCCGTCGCCCCTGTT | 13 | 19 |
| 8TTOC | AAACA | TCTGGCACCAGG | | |
| DNMT1_4H_ | GATTCCTGGTGCCAG | GCCCTCCCGTCGCCCCTGTT | 13 | 19 |
| 8TTOG | AAACA | TCTGGCACCAGG | | |
| HEK3_4J_ | GGCCCAGACTGAGCA | TGGAGGAAGCAGGGCTTCC | 13 | 29 |
| DEL1-5 | CGTGA | TTTCCTCTGCCGTGCTCAGT | | |
| | | CTG | | |
| HEK3_4J_ | GGCCCAGACTGAGCA | TGGAGGAAGCAGGGCTTCC | 13 | 24 |
| DEL1-10 | CGTGA | TTTCCCGTGCTCAGTCTG | | |
| HEK3_4J_ | GGCCCAGACTGAGCA | TGGAGGAAGCAGGGCTTCC | 13 | 19 |
| DEL1-15 | CGTGA | CGTGCTCAGTCTG | | |
| HEK3_4J_ | GGCCCAGACTGAGCA | TGTCCTGCGACGCCCTCTG | 13 | 26 |
| DEL1-25 | CGTGA | GAGGAAGCGTGCTCAGTCT | | |
| | | G | | |
| HEK3_4J_ | GGCCCAGACTGAGCA | TGTCCTGCGACGCCCTCTG | 13 | 21 |
| DEL1-30 | CGTGA | GACGTGCTCAGTCTG | | |
| HEK3_4J_ | GGCCCAGACTGAGCA | AGTATCCCGGTGCAGGAGC | 13 | 20 |
| DEL1-80 | CGTGA | TCGTGCTCAGTCTG | | |
| HEK3_4I_ | GGCCCAGACTGAGCA | TCTGCCATCATCGTGCTCAG | 13 | 11 |
| 1AINS | CGTGA | TCTG | | |
| HEK3_4I_ | GGCCCAGACTGAGCA | TCTGCCATCAAAGCGTGCT | 13 | 13 |
| 1CTTINS | CGTGA | CAGTCTG | | |
| HEK3_4I_ | GGCCCAGACTGAGCA | TCTGCCATCCGTGCTCAGTC | 13 | 9 |
| 1TDEL | CGTGA | TG | | |
| HEK3_4I_1- | GGCCCAGACTGAGCA | TGGAGGAAGCAGGGCTTCC | 13 | 31 |
| 3TGADEL | CGTGA | TTTCCTCTGCCACGTGCTCA | | |
| | | GTCTG | | |
| RNF2_4I_ | GTCATCTTAGTCATTA | AACGAACACCTCAGAGTAA | 15 | 15 |
| 1TINS | CCTG | TGACTAAGATG | | |
| RNF2_4I_ | GTCATCTTAGTCATTA | AACGAACACCTCAGTACGT | 15 | 17 |
| 1GTAINS | CCTG | AATGACTAAGATG | | |
| RNF2_4I_ | GTCATCTTAGTCATTA | AACGAACACCCAGGTAATG | 15 | 13 |
| 4ADEL | CCTG | ACTAAGATG | | |
| RNF2_4I_3- | GTCATCTTAGTCATTA | AACGAACACAGGTAATGAC | 15 | 11 |
| 5GAGDEL | CCTG | TAAGATG | | |
| FANCF_4I_ | GGAATCCCTTCTGCA | GGAAAAGCGATCCAGGGTG | 14 | 18 |
| 3CINS | GCACC | CTGCAGAAGGGAT | | |
| FANCF_4I_ | GGAATCCCTTCTGCA | GGAAAAGCGATCCAATCGG | 14 | 20 |
| 4GATINS | GCACC | TGCTGCAGAAGGGAT | | |
| FANCF_4I_ | GGAATCCCTTCTGCA | GGAAAAGCGATCAGGTGCT | 14 | 16 |
| 6GDEL | GCACC | GCAGAAGGGAT | | |
| FANCF_4I_ | GGAATCCCTTCTGCA | GGAAAAGCGAAGGTGCTGC | 14 | 14 |
| 5-7GGADEL | GCACC | AGAAGGGAT | | |
| EMX1_4I_ | GAGTCCGAGCAGAA | GTGATGGGAGCACCTTCTT | 14 | 17 |
| 6TINS | GAAGAA | CTTCTGCTCGGA | | |
| EMX1_4I_ | GAGTCCGAGCAGAA | GTGATGGGAGCCCTTCGCA | 14 | 19 |
| 1TGCINS | GAAGAA | TTCTTCTGCTCGGA | | |
| EMX1_4I_ | GAGTCCGAGCAGAA | GTGATGGGAGCCTTCTTCTT | 14 | 15 |
| 5GDEL | GAAGAA | CTGCTCGGA | | |
| EMX1_4I_4- | GAGTCCGAGCAGAA | GTGATGGGAGTTCTTCTTCT | 14 | 13 |
| 6GGGDEL | GAAGAA | GCTCGGA | | |
| RUNX1_4I_ | GCATTTTCAGGAGGA | TGTCTGAAGCCATCGGCTTC | 15 | 16 |
| 1CINS | AGCGA | CTCCTGAAAAT | | |
| RUNX1_4I_ | GCATTTTCAGGAGGA | TGTCTGAAGCCATCCATGCT | 15 | 18 |
| 1ATGINS | AGCGA | TCCTCCTGAAAAT | | |
| RUNX1_4I_ | GCATTTTCAGGAGGA | TGTCTGAAGCCATGCTTCCT | 15 | 14 |
| 2GDEL | AGCGA | CCTGAAAAT | | |
| RUNX1_4I_ | GCATTTTCAGGAGGA | TGTCTGAAGCCGCTTCCTCC | 15 | 12 |
| 2-4GATDEL | AGCGA | TGAAAAT | | |
| VEGFA_4I_ | GATGTCTGCAGGCCA | AATGTGCCATCTGGAGCCG | 13 | 23 |
| 4CINS | GATGA | CTCATCTGGCCTGCAGA | | |
| VEGFA_4I_ | GATGTCTGCAGGCCA | AATGTGCCATCTGGAGCCCT | 13 | 25 |
| 2ACAINS | GATGA | TGTCATCTGGCCTGCAGA | | |
| VEGFA_4I_ | GATGTCTGCAGGCCA | AATGTGCCATCTGGAGCCC | 13 | 21 |
| 3ADEL | GATGA | CATCTGGCCTGCAGA | | |
| VEGFA_4I_ | GATGTCTGCAGGCCA | AATGTGCCATCTGGAGCCAT | 13 | 19 |
| 2-4GAGDEL | GATGA | CTGGCCTGCAGA | | |
| DNMT1_4I_ | GATTCCTGGTGCCAG | TCCCGTCACCCGCTGTTTCT | 13 | 16 |
| 4CINS | AAACA | GGCACCAGG | | |
| DNMT1_4I_ | GATTCCTGGTGCCAG | TCCCGTCACCCCTGTGATTT | 13 | 18 |
| 1TCAINS | AAACA | CTGGCACCAGG | | |
| DNMT1_4I_ | GATTCCTGGTGCCAG | TCCCGTCACCCCGTTTCTGG | 13 | 14 |
| 3ADEL | AAACA | CACCAGG | | |
| DNMT1_4I_ | GATTCCTGGTGCCAG | TCCCGTCACCGTTTCTGGCA | 13 | 12 |
| 3-5AGGDEL | AAACA | CCAGG | | |
| HEK3_4K_ | GGCCCAGACTGAGCA | TGGAGGAAGCAGGGCTTCC | 13 | 36 |
| 1CTTINS_ | CGTGA | TTTCCTCTGCATCAAAGCGT | | |
| 5GDEL | | GCTCAGTCTG | | |
| HEK3_4K_ | GGCCCAGACTGAGCA | TGGAGGAAGCAGGGCTTCC | 13 | 37 |
| 1CTTINS_ | CGTGA | TTTCCTCTGCCATGAAAGCG | | |
| 2GTOC | | TGCTCAGTCTG | | |
| HEK3_4K_ | GGCCCAGACTGAGCA | TGGAGGAAGCAGGGCTTCC | 13 | 33 |
| 3TDEL_ | CGTGA | TTTCCTCTGCGATCCGTGCT | | |
| 5GTOC | | CAGTCTG | | |
| HEK3_4K_ | GGCCCAGACTGAGCA | TGGAGGAAGCAGGGCTTCC | 13 | 34 |
| 3GTOC_ | CGTGA | TTTCCTCTGACATGACGTGC | | |
| 6GTOT | | TCAGTCTG | | |
| RNF2_4K_ | GTCATCTTAGTCATTA | AACGAACACCATTGGTAAT | 15 | 14 |
| 2AAINS_3- | CCTG | GACTAAGATG | | |
| 4GADEL | | | | |
| RNF2_4K_ | GTCATCTTAGTCATTA | AACGAACACGTCAGTGTAA | 15 | 15 |
| 1AINS_ | CCTG | TGACTAAGATG | | |
| 5GTOC | | | | |
| RNF2_4K_1- | GTCATCTTAGTCATTA | AACGAACAACTCGTAATGA | 15 | 12 |
| 2CTDEL_ | CCTG | CTAAGATG | | |
| 6GTOT | | | | |
| RNF2_4K_ | GTCATCTTAGTCATTA | AACGAACACATCATGTAAT | 15 | 14 |
| 1CTOA_ | CCTG | GACTAAGATG | | |
| 5GTOT | | | | |
| FANCF_4K_ | GGAATCCCTTCTGCA | GGAAAAGCGATCGGTAGCT | 14 | 16 |
| 1TINS_3- | GCACC | GCAGAAGGGAT | | |
| 4TGDEL | | | | |
| FANCF_4K_ | GGAATCCCTTCTGCA | GGAAAAGCGATTCAGGTAG | 14 | 18 |
| 1TINS_ | GCACC | CTGCAGAAGGGAT | | |
| 6GTOA | | | | |
| FANCF_4K_ | GGAATCCCTTCTGCA | GGAAAAGCGATCAAGTGCT | 14 | 16 |
| 2CDEL_ | GCACC | GCAGAAGGGAT | | |
| 5GTOT | | | | |

TABLE 3E
FIGS. 41A-41K nicking sgRNA

| | SPACER SEQUENCE (SEQ ID |
|---|---|
| NICKING SGRNA | NOS: 3456-3463) |
| HEK3_4A_+90 | GTCAACCAGTATCCCGGTGC |
| HEK3_4B_+90 | GTCAACCAGTATCCCGGTGC |
| RNF2_4C_+41 | GTCAACCATTAAGCAAAACAT |
| FANCF_4D_+48 | GGGGTCCCAGGTGCTGACGT |
| EMX1_4E_+53 | GACATCGATGTCCTCCCCAT |
| RUNX1_4F_+38 | GATGAAGCACTGTGGGTACGA |
| VEGFA_4G_+57 | GATGTACAGAGAGCCCAGGGC |
| DNMTl_4H_+49 | GCCCTTCAGCTAAAATAAAGG |

TABLE 3F
FIGS. 42A-42H PEgRNA

| | | | | RT |
|---|---|---|---|---|
| | SPACER SEQUENCE | | PBS | TEMPLATE |
| | (SEQ ID NOS: | 3′ EXTENSION (SEQ ID NOS: | LENGTH | LENGTH |
| PEGRNA | 3464-3478) | 3479-3493) | (NT) | (NT) |
| HEK3_5A_ | GGCCCAGACTGAGC | TCTGTCATCACGTGCTCAGTCTG | 13 | 10 |
| C3 | ACGTGA | | | |
| HEK3_5A_ | GGCCCAGACTGAGC | TCTGCTATCACGTGCTCAGTCTG | 13 | 10 |
| C4 | ACGTGA | | | |
| HEK3_5A_ | GGCCCAGACTGAGC | TCTGCCATTACGTGCTCAGTCTG | 13 | 10 |
| C7 | ACGTGA | | | |
| FANCF_5A_ | GGAATCCCTTCTGCA | GGAAAAGTGATCCAGGTGCTGC | 14 | 17 |
| C3 | GCACC | AGAAGGGAT | | |
| FANCF_5A_ | GGAATCCCTTCTGCA | GGAAAAGCGATTCAGGTGCTGC | 14 | 17 |
| C7 | GCACC | AGAAGGGAT | | |
| FANCF_5A_ | GGAATCCCTTCTGCA | GGAAAAGCGATCTAGGTGCTGC | 14 | 17 |
| C8 | GCACC | AGAAGGGAT | | |
| EMX1_5A_ | GAGTCCGAGCAGAA | GTGATGGGAGTCCTTCTTCTTCT | 14 | 16 |
| C5 | GAAGAA | GCTCGGA | | |
| EMX1_5A_ | GAGTCCGAGCAGAA | GTGATGGGAGCTCTTCTTCTTCT | 14 | 16 |
| C6 | GAAGAA | GCTCGGA | | |
| EMX1_5A_ | GAGTCCGAGCAGAA | GTGATGGGAGCCTTTCTTCTTCT | 14 | 16 |
| C7 | GAAGAA | GCTCGGA | | |
| EMX1_5C_ | GAGTCCGAGCAGAA | GTGATGGGAGTTCTTCTTCTTCT | 14 | 16 |
| C5_6 | GAAGAA | GCTCGGA | | |
| EMX1_5C_ | GAGTCCGAGCAGAA | GTGATGGGAGTCTTTCTTCTTCT | 14 | 16 |
| C5_7 | GAAGAA | GCTCGGA | | |
| EMX1_5C_ | GAGTCCGAGCAGAA | GTGATGGGAGCTTTTCTTCTTCT | 14 | 16 |
| C6_7 | GAAGAA | GCTCGGA | | |
| EMX1_5C_ | GAGTCCGAGCAGAA | GTGATGGGAGTTTTTCTTCTTCT | 14 | 16 |
| C5_6_7 | GAAGAA | GCTCGGA | | |
| HEK3_5D_ | GGCCCAGACTGAGC | TCTGCCGTCACGTGCTCAGTCT | 13 | 10 |
| A5 | ACGTGA | G | | |
| HEK3_5D_ | GGCCCAGACTGAGC | TCTGCCATCGCGTGCTCAGTCT | 13 | 10 |
| A8 | ACGTGA | G | | |

TABLE 3G
FIGS. 42A-42H nicking sgRNA

| | POSSIBLE SPACER SEQUENCE | SEQUENCE(SEQ ID NOS: |
|---|---|---|
| NICKING SGRNA | (SEQ ID NOS: 616-618) | 619-621) |
| HEK3_5A-F_+90 | GTCAACCAGTATCCCGGTGC | GTCAACCAGTATCCCGGTGC |
| FANCF_5A-F_+48 | GGGGTCCCAGGTGCTGACGT | GATGTACAGAGAGCCCAGGGC |
| EMX1_5A-F_+57 | GATGTACAGAGAGCCCAGGGC | GGGGTCCCAGGTGCTGACGT |

TABLE 3H
FIGS. 42A-42H base editing sgRNA

| BASE EDITING | |
|---|---|
| SGRNA | SPACER SEQUENCE |
| HEK3_5A-F_BE | GTGCCATCACGTGCTCAGTCT (SEQ |
| | ID NO: 455) |
| FANCF_5A-F_BE | GAGCGATCCAGGTGCTGCAGA (SEQ |
| | ID NO: 456) |
| EMX1_5A-F_BE | GGAGCCCTTCTTCTTCTGCT (SEQ ID |
| | NO: 457) |

TABLE 3I
FIGS. 42A-42H on-target sgRNA

| ON-TARGET | |
|---|---|
| SGRNA | SPACER SEQUENCE |
| HEK3_5G | GGCCCAGACTGAGCACGTGA (SEQ ID |
| | NO: 510) |
| HEK4_5G | GGCACTGCGGCTGGAGGTGG (SEQ ID |
| | NO: 511) |
| EMX1_5G | GAGTCCGAGCAGAAGAAGAA (SEQ |
| | ID NO: 512) |
| FANCF_5G | GGAATCCCTTCTGCAGCACC (SEQ ID |
| | NO: 513) |

TABLE 3J
FIGS. 42A-42H on-target PEgRNA

| | | | | RT |
|---|---|---|---|---|
| | | | PBS | TEMPLATE |
| ON-TARGET | SPACER SEQUENCE | 3′ EXTENSION | LENGTH | LENGTH |
| PEGRNA | (SEQ ID NO: 663-677) | (SEQ ID NO: 678-692) | (NT) | (NT) |
| HEK3_5G- | GGCCCAGACTGAGCAC | TCTGCCATCTCGTGCTCAG | 13 | 10 |
| H_PEGRNA_1 | GTGA | TCTG | | |
| HEK3_5G- | GGCCCAGACTGAGCAC | TCTGCCATCAAAGCGTGCT | 13 | 13 |
| H_PEGRNA_2 | GTGA | CAGTCTG | | |
| HEK3_5G- | GGCCCAGACTGAGCAC | TCTGCCATCCGTGCTCAGT | 13 | 9 |
| H_PEGRNA_3 | GTGA | CTG | | |
| HEK3_5G- | GGCCCAGACTGAGCAC | TCTGCGATCACGTGCTCAG | 13 | 10 |
| H_PEGRNA_4 | GTGA | TCTG | | |
| HEK4_5G- | GGCACTGCGGCTGGAG | TTAACGCCCACCTCCAGCC | 9 | 10 |
| H_PEGRNA_1 | GTGG | | | |
| HEK4_5G- | GGCACTGCGGCTGGAG | TTAACCCCCCCCTCCAGCC | 9 | 10 |
| H_PEGRNA_2 | GTGG | | | |
| HEK4_5G- | GGCACTGCGGCTGGAG | TTAACCCCTTACACCTCCA | 9 | 13 |
| H_PEGRNA_3 | GTGG | GCC | | |
| HEK4_5G- | GGCACTGCGGCTGGAG | TTAACCCCCCCTCCAGCC | 9 | 9 |
| H_PEGRNA_4 | GTGG | | | |
| EMX1_5G- | GAGTCCGAGCAGAAGA | GTGATGGGAGCACTTCTTC | 14 | 16 |
| H_PEGRNA_1 | AGAA | TTCTGCTCGGA | | |
| EMX1_5G- | GAGTCCGAGCAGAAGA | GTGATGGGAGCCCTGCTTC | 14 | 16 |
| H_PEGRNA_2 | AGAA | TTCTGCTCGGA | | |
| EMX1_5G- | GAGTCCGAGCAGAAGA | GTGATGGGAGCCCTTCGCA | 14 | 19 |
| H_PEGRNA_3 | AGAA | TTCTTCTGCTCGGA | | |
| EMX1_5G- | GAGTCCGAGCAGAAGA | GTGATGGGAGTTCTTCTTC | 14 | 13 |
| H_PEGRNA_4 | AGAA | TGCTCGGA | | |
| FANCF_5G- | GGAATCCCTTCTGCAG | GGAAAAGCGATGCAGGTG | 14 | 17 |
| H_PEGRNA_1 | CACC | CTGCAGAAGGGAT | | |
| FANCF_5G- | GGAATCCCTTCTGCAG | GGAAAAGCGATCCAGGCG | 14 | 17 |
| H_PEGRNA_2 | CACC | CTGCAGAAGGGAT | | |
| FANCF_5G- | GGAATCCCTTCTGCAG | GGAAAAGCGATCCAATCG | 14 | 20 |
| H_PEGRNA_3 | CACC | GTGCTGCAGAAGGGAT | | |

TABLE 3K
FIGS. 49A-49BPEgRNA

| | | | | RT |
|---|---|---|---|---|
| | SPACER | | PBS | TEMPLATE |
| | SEQUENCE (SEQ | 3′ EXTENSION (SEQ | LENGTH | LENGTH |
| PEGRNA | ID NO: 3494-3521) | ID NO: 3522-3540) | (NT) | (NT) |
| HEK3_6A_ | GGCCCAGACTGA | TCTGCCATGACGTGCTCAG | 13 | 10 |
| 2GTOC | GCACGTGA | TCTG | | |
| HEK3_6A_ | GGCCCAGACTGA | | | |
| 2GTOC | GCACGTGA | | | |
| EMX1_6A_ | GAGTCCGAGCAG | ATGGGAGCCCTTGTTCTTC | 13 | 13 |
| 3GTOC | AAGAAGAA | TGCTCGG | | |
| EMX1_6A_ | GAGTCCGAGCAG | | | |
| 3GTOC | AAGAAGAA | | | |
| FANCF_6A_ | GGAATCCCTTCTG | AAAAGCGATCAAGGTGCT | 13 | 15 |
| 5GTOT | CAGCACC | GCAGAAGGGA | | |
| FANCF_6A_ | GGAATCCCTTCTG | | | |
| 5GTOT | CAGCACC | | | |
| HEK3_6A_ | GGCCCAGACTGA | TGGAGGAAGCAGGGCTTC | 13 | 52 |
| 1HIS6INS | GCACGTGA | CTTTCCTCTGCCATCAATG | | |
| | | ATGGTGATGATGGTGCGTG | | |
| | | CTCAGTCTG | | |
| HEK3_6A_ | GGCCCAGACTGA | | | |
| 1HIS6INS | GCACGTGA | | | |
| HEK3_6A_ | GGCCCAGACTGA | TCTGCAATCACGTGCTCAG | 13 | 10 |
| 5GTOT | GCACGTGA | TCTG | | |
| HEK3_6A_ | GGCCCAGACTGA | | | |
| 5GTOT | GCACGTGA | | | |
| HEK3_6A_ | GGCCCAGACTGA | TCTGCCATCAAAGCGTGCT | 13 | 10 |
| 1CTTINS | GCACGTGA | CAGTCTG | | |
| HEK3_6A_ | GGCCCAGACTGA | | | |
| 1CTTINS | GCACGTGA | | | |
| HBB_6B_ | GCATGGTGCACCT | AGACTTCTCCACAGGAGT | 13 | 14 |
| INSALL | GACTCCTG | CAGGTGCAC | | |
| HBB_6B_ | GCATGGTGCACCT | | | |
| INSALL | GACTCCTG | | | |
| HBB_6B_ | GCATGGTGCACCT | AGACTTCTCCTCAGGAGTC | 13 | 14 |
| CORRECT | GACTCCTG | AGGTGCAC | | |
| HBB_6B_ | GCATGGTGCACCT | | | |
| CORRECT | GACTCCTG | | | |
| HBB_6B_COR | GCATGGTGCACCT | AGACTTCTCTTCAGGAGTC | 13 | 14 |
| RECT_W_ | GACTCCTG | AGGTGCAC | | |
| SILENT | | | | |
| HBB_6B_COR | GCATGGTGCACCT | | | |
| RECT_W_ | GACTCCTG | | | |
| SILENT | | | | |
| HEXA_6B_ | GTACCTGAACCGT | AGTCAGGGCCATAGGATAG | 12 | 14 |
| INSTALL | ATATCCTA | ATATACGGTTC | | |
| HEXA_6B_ | GATCCTTCCAGTC | ACCTGAACCGTATATCCTAT | 10 | 21 |
| CORRECT | AGGGCCAT | GGCCCTGACTG | | |
| HEXA_6B_ | GATCCTTCCAGTC | GTACCTGAACCGTATATCTT | 9 | 27 |
| CORRECT_W_ | AGGGCCAT | ATGGCCCTGACT | | |
| SILENT | | | | |
| PRNP_6C | GCAGTGGTGGGG | ATGTAGACGCCAAGGCCCC | 12 | 12 |
| | GGCCTTGG | CCACC | | |
| HEK3_6E- | GGCCCAGACTGA | TCTGCCATCCCGTGCTCAG | 13 | 10 |
| G_1TTOG | GCACGTGA | TCTG | | |
| HEK3_6E- | GGCCCAGACTGA | TCTGCCATCAAAGCGTGCT | 13 | 10 |
| G_1CTTINS | GCACGTGA | CAGTCTG | | |
| RNF2_6E- | GTCATCTTAGTCA | AACGAACACCTCACGTAAT | 15 | 14 |
| G_1CTOG | TTACCTG | GACTAAGATG | | |
| HBB_6E- | GCATGGTGCACCT | AGACTTCTCCACAGGAGT | 13 | 14 |
| G_4ATOT | GACTCCTG | CAGGTGCAC | | |
| HEK3_6H_ | GGCCCAGACTGA | TGGAGGAAGCAGGGCTTC | 13 | 52 |
| 1HIS6INS | GCACGTGA | CTTTCCTCTGCCATCAATG | | |
| | | ATGGTGATGATGGTGCGTG | | |
| | | CTCAGTCTG | | |
| HEK3_6H_ | GGCCCAGACTGA | TGGAGGAAGCAGGGCTTC | 13 | 58 |
| 1FLAGINS | GCACGTGA | CTTTCCTCTGCCATCACTTA | | |
| | | TCGTCGTCATCCTTGTAATC | | |
| | | CGTGCTCAGTCTG | | |

TABLE 3L
FIGS. 47A-74D PEgRNA

| | | | | RT |
|---|---|---|---|---|
| | | | PBS | TEMPLATE |
| | SPACER SEQUENCE | 3′ EXTENSION SEQUENCE | LENGTH | LENGTH |
| PEGRNA | (SEQ ID NO: 3541-3547) | (SEQ ID NO: 3549-3556) | (NT) | (NT) |
| HEK3_ED4B_ | GGCCCAGACTGAGCA | TCTGCCATCCGTGCTCAGTC | 13 | 9 |
| 1TDEL | CGTGA | TG | | |
| HEK3_ED4B_ | GGCCCAGACTGAGCA | TCTGCCATCATCGTGCTCAG | 13 | 11 |
| 1AINS | CGTGA | TCTG | | |
| HEK3_ED4B_ | GGCCCAGACTGAGCA | TCTGCCATCAAAGCGTGCT | 13 | 13 |
| 1CTTINS | CGTGA | CAGTCTG | | |
| HEK3_ED4C_ | GGCCCAGACTGAGCA | TCTGCCATGACGTGCTCAGT | 13 | 10 |
| 2GTOC | CGTGA | CTG | | |
| HEK3_ED4D_ | GGCCCAGACTGAGCA | TGGAGGAAGCAGGGCTTCC | 13 | 58 |
| 1FLAGINS | CGTGA | TTTCCTCTGCCATCACTTAT | | |
| | | CGTCGTCATCCTTGTAATCC | | |
| | | GTGCTCAGTCTG | | |
| RNF2_ED4E_ | GTCATCTTAGTCATTA | AACGAACACCTCATGTAAT | 15 | 14 |
| 1CTOA | CCTG | GACTAAGATG | | |
| EMX1_ED4F_ | GAGTCCGAGCAGAAG | ATGGGAGCCCTTGTTCTTCT | 13 | 13 |
| 1GTOC | AAGAA | GCTCGG | | |
| HBB_ED4G_ | GTAACGGCAGACTTCT | ATCTGACTCCTGTGGAGAA | 12 | 14 |
| 2TTOA | CCTC | GTCTGCC | | |

TABLE 3M
FIGS. 48A-48C PEgRNA

| | | | | RT |
|---|---|---|---|---|
| | SPACER SEQUENCE | | PBS | TEMPLATE |
| | (SEQ ID NO: | 3′ EXTENSION SEQUENCE (SEQ | LENGTH | LENGT |
| PEGRNA | 3557-3627) | ID NO: 3628-3698) | (NT) | H(NT) |
| VEGFA_ | GATGTCTGCAGGCC | CCCTCTGACAATGTGCCATCTG | 13 | 31 |
| ED5A_31 | AGATGA | GAGCACTCATCTGGCCTGCAG | | |
| | | A | | |
| VEGFA_ | GATGTCTGCAGGCC | CCTCTGACAATGTGCCATCTGG | 13 | 30 |
| ED5A_30 | AGATGA | AGCACTCATCTGGCCTGCAGA | | |
| VEGFA_ | GATGTCTGCAGGCC | CTCTGACAATGTGCCATCTGGA | 13 | 29 |
| ED5A_29 | AGATGA | GCACTCATCTGGCCTGCAGA | | |
| VEGFA_ | GATGTCTGCAGGCC | TCTGACAATGTGCCATCTGGAG | 13 | 28 |
| ED5A_28 | AGATGA | CACTCATCTGGCCTGCAGA | | |
| VEGFA_ | GATGTCTGCAGGCC | CTGACAATGTGCCATCTGGAGC | 13 | 27 |
| ED5A_27 | AGATGA | ACTCATCTGGCCTGCAGA | | |
| VEGFA_ | GATGTCTGCAGGCC | TGACAATGTGCCATCTGGAGCA | 13 | 26 |
| ED5A_26 | AGATGA | CTCATCTGGCCTGCAGA | | |
| VEGFA_ | GATGTCTGCAGGCC | GACAATGTGCCATCTGGAGCAC | 13 | 25 |
| ED5A_25 | AGATGA | TCATCTGGCCTGCAGA | | |
| VEGFA_ | GATGTCTGCAGGCC | ACAATGTGCCATCTGGAGCACT | 13 | 24 |
| ED5A_24 | AGATGA | CATCTGGCCTGCAGA | | |
| VEGFA_ | GATGTCTGCAGGCC | CAATGTGCCATCTGGAGCACTC | 13 | 23 |
| ED5A_23 | AGATGA | ATCTGGCCTGCAGA | | |
| VEGFA_ | GATGTCTGCAGGCC | AATGTGCCATCTGGAGCACTCA | 13 | 22 |
| ED5A_22 | AGATGA | TCTGGCCTGCAGA | | |
| VEGFA_ | GATGTCTGCAGGCC | ATGTGCCATCTGGAGCACTCAT | 13 | 21 |
| ED5A_21 | AGATGA | CTGGCCTGCAGA | | |
| VEGFA_ | GATGTCTGCAGGCC | TGTGCCATCTGGAGCACTCATC | 13 | 20 |
| ED5A_20 | AGATGA | TGGCCTGCAGA | | |
| VEGFA_ | GATGTCTGCAGGCC | GTGCCATCTGGAGCACTCATCT | 13 | 19 |
| ED5A_19 | AGATGA | GGCCTGCAGA | | |
| VEGFA_ | GATGTCTGCAGGCC | TGCCATCTGGAGCACTCATCTG | 13 | 18 |
| ED5A_18 | AGATGA | GCCTGCAGA | | |
| VEGFA_ | GATGTCTGCAGGCC | GCCATCTGGAGCACTCATCTGG | 13 | 17 |
| ED5A_17 | AGATGA | CCTGCAGA | | |
| VEGFA_ | GATGTCTGCAGGCC | CCATCTGGAGCACTCATCTGGC | 13 | 16 |
| ED5A_16 | AGATGA | CTGCAGA | | |
| VEGFA_ | GATGTCTGCAGGCC | CATCTGGAGCACTCATCTGGCC | 13 | 15 |
| ED5A_15 | AGATGA | TGCAGA | | |
| VEGFA_ | GATGTCTGCAGGCC | ATCTGGAGCACTCATCTGGCCT | 13 | 14 |
| ED5A_14 | AGATGA | GCAGA | | |
| VEGFA_ | GATGTCTGCAGGCC | TCTGGAGCACTCATCTGGCCTG | 13 | 13 |
| ED5A_13 | AGATGA | CAGA | | |
| VEGFA_ | GATGTCTGCAGGCC | CTGGAGCACTCATCTGGCCTGC | 13 | 12 |
| ED5A_12 | AGATGA | AGA | | |
| VEGFA_ | GATGTCTGCAGGCC | TGGAGCACTCATCTGGCCTGCA | 13 | 11 |
| ED5A_11 | AGATGA | GA | | |
| VEGFA_ | GATGTCTGCAGGCC | GGAGCACTCATCTGGCCTGCA | 13 | 10 |
| ED5A_10 | AGATGA | GA | | |
| VEGFA_ | GATGTCTGCAGGCC | GAGCACTCATCTGGCCTGCAG | 13 | 9 |
| ED5A_9 | AGATGA | A | | |
| VEGFA_ | GATGTCTGCAGGCC | AGCACTCATCTGGCCTGCAGA | 13 | 8 |
| ED5A_8 | AGATGA | | | |
| DNMT1_ | GATTCCTGGTGCCA | AGGACTAGTTCTGCCCTCCCGT | 13 | 31 |
| ED5B_31 | GAAACA | CACCACTGTTTCTGGCACCAGG | | |
| DNMT1_ | GATTCCTGGTGCCA | GGACTAGTTCTGCCCTCCCGTC | 13 | 30 |
| ED5B_30 | GAAACA | ACCACTGTTTCTGGCACCAGG | | |
| DNMT1_ | GATTCCTGGTGCCA | GACTAGTTCTGCCCTCCCGTCA | 13 | 29 |
| ED5B_29 | GAAACA | CCACTGTTTCTGGCACCAGG | | |
| DNMT1_ | GATTCCTGGTGCCA | ACTAGTTCTGCCCTCCCGTCAC | 13 | 28 |
| ED5B_28 | GAAACA | CACTGTTTCTGGCACCAGG | | |
| DNMT1_ | GATTCCTGGTGCCA | CTAGTTCTGCCCTCCCGTCACC | 13 | 27 |
| ED5B_27 | GAAACA | ACTGTTTCTGGCACCAGG | | |
| DNMT1_ | GATTCCTGGTGCCA | TAGTTCTGCCCTCCCGTCACCA | 13 | 26 |
| ED5B_26 | GAAACA | CTGTTTCTGGCACCAGG | | |
| DNMT1_ | GATTCCTGGTGCCA | AGTTCTGCCCTCCCGTCACCAC | 13 | 25 |
| ED5B_25 | GAAACA | TGTTTCTGGCACCAGG | | |
| DNMT1_ | GATTCCTGGTGCCA | GTTCTGCCCTCCCGTCACCACT | 13 | 24 |
| ED5B_24 | GAAACA | GTTTCTGGCACCAGG | | |
| DNMT1_ | GATTCCTGGTGCCA | TTCTGCCCTCCCGTCACCACTG | 13 | 23 |
| ED5B_23 | GAAACA | TTTCTGGCACCAGG | | |
| DNMT1_ | GATTCCTGGTGCCA | TCTGCCCTCCCGTCACCACTGT | 13 | 22 |
| ED5B_22 | GAAACA | TTCTGGCACCAGG | | |
| DNMT1_ | GATTCCTGGTGCCA | CTGCCCTCCCGTCACCACTGTT | 13 | 21 |
| ED5B_21 | GAAACA | TCTGGCACCAGG | | |
| DNMT1_ | GATTCCTGGTGCCA | TGCCCTCCCGTCACCACTGTTT | 13 | 20 |
| ED5B_20 | GAAACA | CTGGCACCAGG | | |
| DNMT1_ | GATTCCTGGTGCCA | GCCCTCCCGTCACCACTGTTTC | 13 | 19 |
| ED5B_19 | GAAACA | TGGCACCAGG | | |
| DNMT1_ | GATTCCTGGTGCCA | CCCTCCCGTCACCACTGTTTCT | 13 | 18 |
| ED5B_18 | GAAACA | GGCACCAGG | | |
| DNMT1_ | GATTCCTGGTGCCA | CCTCCCGTCACCACTGTTTCTG | 13 | 17 |
| ED5B_17 | GAAACA | GCACCAGG | | |
| DNMT1_ | GATTCCTGGTGCCA | CTCCCGTCACCACTGTTTCTGG | 13 | 16 |
| ED5B_16 | GAAACA | CACCAGG | | |
| DNMT1_ | GATTCCTGGTGCCA | TCCCGTCACCACTGTTTCTGGC | 13 | 15 |
| ED5B_15 | GAAACA | ACCAGG | | |
| DNMT1_ | GATTCCTGGTGCCA | CCCGTCACCACTGTTTCTGGCA | 13 | 14 |
| ED5B_14 | GAAACA | CCAGG | | |
| DNMT1_ | GATTCCTGGTGCCA | CCGTCACCACTGTTTCTGGCAC | 13 | 13 |
| ED5B_13 | GAAACA | CAGG | | |
| DNMT1_ | GATTCCTGGTGCCA | CGTCACCACTGTTTCTGGCACC | 13 | 12 |
| ED5B_12 | GAAACA | AGG | | |
| DNMT1_ | GATTCCTGGTGCCA | GTCACCACTGTTTCTGGCACCA | 13 | 11 |
| ED5B_11 | GAAACA | GG | | |
| DNMT1_ | GATTCCTGGTGCCA | TCACCACTGTTTCTGGCACCAG | 13 | 10 |
| ED5B_10 | GAAACA | G | | |
| DNMT1_ | GATTCCTGGTGCCA | CACCACTGTTTCTGGCACCAGG | 13 | 9 |
| ED5B_9 | GAAACA | | | |
| DNMT1_ | GATTCCTGGTGCCA | ACCACTGTTTCTGGCACCAGG | 13 | 8 |
| ED5B_8 | GAAACA | | | |
| RUNX1_ | GCATTTTCAGGAGG | AATGACTCAAATATGCTGTCTG | 15 | 31 |
| ED5C_31 | AAGCGA | AAGCAATCGCTTCCTCCTGAAA | | |
| | | AT | | |
| RUNX1_ | GCATTTTCAGGAGG | ATGACTCAAATATGCTGTCTGA | 15 | 30 |
| ED5C_30 | AAGCGA | AGCAATCGCTTCCTCCTGAAAA | | |
| | | T | | |
| RUNX1_ | GCATTTTCAGGAGG | TGACTCAAATATGCTGTCTGAA | 15 | 29 |
| ED5C_29 | AAGCGA | GCAATCGCTTCCTCCTGAAAAT | | |
| RUNX1_ | GCATTTTCAGGAGG | GACTCAAATATGCTGTCTGAAG | 15 | 28 |
| ED5C_28 | AAGCGA | CAATCGCTTCCTCCTGAAAAT | | |
| RUNX1_ | GCATTTTCAGGAGG | ACTCAAATATGCTGTCTGAAGC | 15 | 27 |
| ED5C_27 | AAGCGA | AATCGCTTCCTCCTGAAAAT | | |
| RUNX1_ | GCATTTTCAGGAGG | CTCAAATATGCTGTCTGAAGCA | 15 | 26 |
| ED5C_26 | AAGCGA | ATCGCTTCCTCCTGAAAAT | | |
| RUNX1_ | GCATTTTCAGGAGG | TCAAATATGCTGTCTGAAGCAA | 15 | 25 |
| ED5C_25 | AAGCGA | TCGCTTCCTCCTGAAAAT | | |
| RUNX1_ | GCATTTTCAGGAGG | CAAATATGCTGTCTGAAGCAAT | 15 | 24 |
| ED5C_24 | AAGCGA | CGCTTCCTCCTGAAAAT | | |
| RUNX1_ | GCATTTTCAGGAGG | AAATATGCTGTCTGAAGCAATC | 15 | 23 |
| ED5C_23 | AAGCGA | GCTTCCTCCTGAAAAT | | |
| RUNX1_ | GCATTTTCAGGAGG | AATATGCTGTCTGAAGCAATCG | 15 | 22 |
| ED5C_22 | AAGCGA | CTTCCTCCTGAAAAT | | |
| RUNX1_ | GCATTTTCAGGAGG | ATATGCTGTCTGAAGCAATCGC | 15 | 21 |
| ED5C_21 | AAGCGA | TTCCTCCTGAAAAT | | |
| RUNX1_ | GCATTTTCAGGAGG | TATGCTGTCTGAAGCAATCGCT | 15 | 20 |
| ED5C_20 | AAGCGA | TCCTCCTGAAAAT | | |
| RUNX1_ | GCATTTTCAGGAGG | ATGCTGTCTGAAGCAATCGCTT | 15 | 19 |
| ED5C_19 | AAGCGA | CCTCCTGAAAAT | | |
| RUNX1_ | GCATTTTCAGGAGG | TGCTGTCTGAAGCAATCGCTTC | 15 | 18 |
| ED5C_18 | AAGCGA | CTCCTGAAAAT | | |
| RUNX1_ | GCATTTTCAGGAGG | GCTGTCTGAAGCAATCGCTTCC | 15 | 17 |
| ED5C_17 | AAGCGA | TCCTGAAAAT | | |
| RUNX1_ | GCATTTTCAGGAGG | CTGTCTGAAGCAATCGCTTCCT | 15 | 16 |
| ED5C_16 | AAGCGA | CCTGAAAAT | | |
| RUNX1_ | GCATTTTCAGGAGG | TGTCTGAAGCAATCGCTTCCTC | 15 | 15 |
| ED5C_15 | AAGCGA | CTGAAAAT | | |
| RUNX1_ | GCATTTTCAGGAGG | GTCTGAAGCAATCGCTTCCTCC | 15 | 14 |
| ED5C_14 | AAGCGA | TGAAAAT | | |
| RUNX1_ | GCATTTTCAGGAGG | TCTGAAGCAATCGCTTCCTCCT | 15 | 13 |
| ED5C_13 | AAGCGA | GAAAAT | | |
| RUNX1_ | GCATTTTCAGGAGG | CTGAAGCAATCGCTTCCTCCTG | 15 | 12 |
| ED5C_12 | AAGCGA | AAAAT | | |
| RUNX1_ | GCATTTTCAGGAGG | TGAAGCAATCGCTTCCTCCTGA | 15 | 11 |
| ED5C_11 | AAGCGA | AAAT | | |
| RUNX1_ | GCATTTTCAGGAGG | GAAGCAATCGCTTCCTCCTGAA | 15 | 10 |
| ED5C_10 | AAGCGA | AAT | | |
| RUNX1_ | GCATTTTCAGGAGG | AAGCAATCGCTTCCTCCTGAAA | 15 | 9 |
| ED5C_9 | AAGCGA | AT | | |

TABLE 3N
FIGS. 48A-48C PEgRNA

| | | | | RT |
|---|---|---|---|---|
| | | | PBS | TEMPLATE |
| | | | LENGTH | LENGTH |
| PEGRNA | SPACER SEQUENCE | 3′ EXTENSION SEQUENCE | (NT) | (NT) |
| HEK3_ED6_ | GGCCCAGACTGAGCAC | TCTGCTATCACGTGCTCA | 13 | 10 |
| 5GTOA | GTGA (SEQ ID NO: 393) | GTCTG (SEQ ID NO: 394) | | |

TABLE 30
FIGS. 48A-48C nicking sgRNA

| NICKING SGRNA | SPACER SEQUENCE |
|---|---|
| HEK3_ED6_+63 | GCACATACTAGCCCCTGTCT (SEQ ID |
| | NO: 395) |

TABLE 3P
FIGS. 50A-50B PEgRNA

| | | | | RT |
|---|---|---|---|---|
| | | | PBS | TEMPLATE |
| | SPACER (SEQ ID | 3′ EXTENSION (5′ TO 3′) | LENGTH | LENGTH |
| PEGRNA | NO: 3699-3754) | (SEQ ID NO: 3755-3810) | (NT) | (NT) |
| HBB | GTAACGGCAGACTT | AGACTTCTCCTCAGGAGTCAGGTGCA | 12 | 14 |
| 3.5 | CTCCAC | C | | |
| HBB | GCATGGTGCACCTG | AGACTTCTCTTCAGGAGTCAGGTGCA | 13 | 14 |
| 3.7 | ACTCCTG | C | | |
| HBB | GCATGGTGCACCTG | TAACGGCAGACTTCTCCTCAGGAGTC | 13 | 19 |
| 5.2 | ACTCCTG | AGGTGCAC | | |
| HBB | GCATGGTGCACCTG | ACGGCAGACTTCTCCTCAGGAGTCAG | 13 | 17 |
| 5.3 | ACTCCTG | GTGCAC | | |
| HBB | GCATGGTGCACCTG | GGCAGACTTCTCCTCAGGAGTCAGGT | 13 | 16 |
| 5.4 | ACTCCTG | GCAC | | |
| HBB | GCATGGTGCACCTG | GCAGACTTCTCCTCAGGAGTCAGGTG | 13 | 13 |
| 5.5 | ACTCCTG | CAC | | |
| HBB | GCATGGTGCACCTG | GACTTCTCCTCAGGAGTCAGGTGCAC | 13 | 12 |
| 5.6 | ACTCCTG | | | |
| HBB | GCATGGTGCACCTG | ACTTCTCCTCAGGAGTCAGGTGCAC | 13 | 21 |
| 5.7 | ACTCCTG | | | |
| HBB | GCATGGTGCACCTG | TAACGGCAGACTTCTCCTCAGGAGTC | 12 | 19 |
| 5.8 | ACTCCTG | AGGTGCA | | |
| HBB | GCATGGTGCACCTG | ACGGCAGACTTCTCCTCAGGAGTCAG | 12 | 17 |
| 5.9 | ACTCCTG | GTGCA | | |
| HBB | GCATGGTGCACCTG | GGCAGACTTCTCCTCAGGAGTCAGGT | 12 | 16 |
| 5.10 | ACTCCTG | GCA | | |
| HBB | GCATGGTGCACCTG | GCAGACTTCTCCTCAGGAGTCAGGTG | 12 | 13 |
| 5.11 | ACTCCTG | CA | | |
| HBB | GCATGGTGCACCTG | GACTTCTCCTCAGGAGTCAGGTGCA | 12 | 12 |
| 5.12 | ACTCCTG | | | |
| HBB | GCATGGTGCACCTG | ACTTCTCCTCAGGAGTCAGGTGCA | 12 | 14 |
| 5.13 | ACTCCTG | | | |
| HEXA | ATCCTTCCAGTCAGG | ATATCTTATGGCCCTGACTGGAA | 13 | 14 |
| S1 | GCCAT | | | |
| HEXA | ATCCTTCCAGTCAGG | TATATCTTATGGCCCTGACTGGAA | 13 | 15 |
| S2 | GCCAT | | | |
| HEXA | ATCCTTCCAGTCAGG | GTATATCTTATGGCCCTGACTGGAA | 13 | 16 |
| S3 | GCCAT | | | |
| HEXA | ATCCTTCCAGTCAGG | ACCGTATATCTTATGGCCCTGACTGGA | 13 | 19 |
| S4 | GCCAT | A | | |
| HEXA | ATCCTTCCAGTCAGG | AACCGTATATCTTATGGCCCTGACTGG | 13 | 20 |
| S5 | GCCAT | AA | | |
| HEXA | ATCCTTCCAGTCAGG | GAACCGTATATCTTATGGCCCTGACTG | 13 | 21 |
| S6 | GCCAT | GAA | | |
| HEXA | ATCCTTCCAGTCAGG | TGAACCGTATATCTTATGGCCCTGACT | 13 | 22 |
| S7 | GCCAT | GGAA | | |
| HEXA | ATCCTTCCAGTCAGG | ATATCTTATGGCCCTGACT | 9 | 14 |
| S8 | GCCAT | | | |
| HEXA | ATCCTTCCAGTCAGG | TATATCTTATGGCCCTGACT | 9 | 15 |
| S9 | GCCAT | | | |
| HEXA | ATCCTTCCAGTCAGG | GTATATCTTATGGCCCTGACT | 9 | 16 |
| S10 | GCCAT | | | |
| HEXA | ATCCTTCCAGTCAGG | ACCGTATATCTTATGGCCCTGACT | 9 | 19 |
| S11 | GCCAT | | | |
| HEXA | ATCCTTCCAGTCAGG | AACCGTATATCTTATGGCCCTGACT | 9 | 20 |
| S12 | GCCAT | | | |
| HEXA | ATCCTTCCAGTCAGG | GAACCGTATATCTTATGGCCCTGACT | 9 | 21 |
| S13 | GCCAT | | | |
| HEXA | ATCCTTCCAGTCAGG | TGAACCGTATATCTTATGGCCCTGACT | 9 | 22 |
| S14 | GCCAT | | | |
| HEXA | ATCCTTCCAGTCAGG | TGAACCGTATATCTTATGGCCCTGAC | 8 | 22 |
| S15 | GCCAT | | | |
| HEXA | ATCCTTCCAGTCAGG | TGAACCGTATATCTTATGGCCCTGACT | 10 | 22 |
| S16 | GCCAT | G | | |
| HEXA | ATCCTTCCAGTCAGG | TGAACCGTATATCTTATGGCCCTGACT | 11 | 22 |
| S17 | GCCAT | GG | | |
| HEXA | ATCCTTCCAGTCAGG | TGAACCGTATATCTTATGGCCCTGACT | 12 | 22 |
| S18 | GCCAT | GGA | | |
| HEXA | ATCCTTCCAGTCAGG | TGAACCGTATATCTTATGGCCCTGACT | 13 | 22 |
| S19 | GCCAT | GGAA | | |
| HEXA | ATCCTTCCAGTCAGG | TGAACCGTATATCTTATGGCCCTGACT | 14 | 22 |
| S20 | GCCAT | GGAAG | | |
| HEXA | ATCCTTCCAGTCAGG | TGAACCGTATATCTTATGGCCCTGACT | 15 | 22 |
| S21 | GCCAT | GGAAGG | | |
| HEXA | ATCCTTCCAGTCAGG | ACCTGAACCGTATATCTTATGGCCCTG | 9 | 25 |
| S22 | GCCAT | ACT | | |
| HEXA | ATCCTTCCAGTCAGG | TACCTGAACCGTATATCTTATGGCCCT | 9 | 26 |
| S23 | GCCAT | GACT | | |
| HEXA | ATCCTTCCAGTCAGG | GTACCTGAACCGTATATCTTATGGCCC | 9 | 27 |
| S24 | GCCAT | TGACT | | |
| HEXA | ATCCTTCCAGTCAGG | GGTACCTGAACCGTATATCTTATGGCC | 9 | 28 |
| S25 | GCCAT | CTGACT | | |
| HEXA | ATCCTTCCAGTCAGG | TGGTACCTGAACCGTATATCTTATGGC | 9 | 29 |
| S26 | GCCAT | CCTGACT | | |
| HEXA | ATCCTTCCAGTCAGG | ACCTGAACCGTATATCCTATGGCCCTG | 13 | 21 |
| 5 | GCCAT | ACTGGAA | | |
| HEXA | ATCCTTCCAGTCAGG | ACCGTATATCCTATGGCCCTGACTGGA | 13 | 15 |
| 6 | GCCAT | A | | |
| HEXA | ATCCTTCCAGTCAGG | ACCTGAACCGTATATCCTATGGCCCTG | 15 | 21 |
| 7 | GCCAT | ACTGGAAGG | | |
| HEXA | ATCCTTCCAGTCAGG | ACCTGAACCGTATATCCTATGGCCCTG | 14 | 21 |
| 8 | GCCAT | ACTGGAAG | | |
| HEXA | ATCCTTCCAGTCAGG | ACCTGAACCGTATATCCTATGGCCCTG | 12 | 21 |
| 9 | GCCAT | ACTGGA | | |
| HEXA | ATCCTTCCAGTCAGG | ACCTGAACCGTATATCCTATGGCCCTG | 11 | 21 |
| 10 | GCCAT | ACTGG | | |
| HEXA | ATCCTTCCAGTCAGG | ACCTGAACCGTATATCCTATGGCCCTG | 10 | 21 |
| 11 | GCCAT | ACTG | | |
| HEXA | ATCCTTCCAGTCAGG | AACCGTATATCCTATGGCCCTGACTGG | 13 | 16 |
| 12 | GCCAT | AA | | |
| HEXA | ATCCTTCCAGTCAGG | TGAACCGTATATCCTATGGCCCTGACT | 13 | 18 |
| 13 | GCCAT | GGAA | | |
| HEXA | ATCCTTCCAGTCAGG | TACCTGAACCGTATATCCTATGGCCCT | 13 | 22 |
| 14 | GCCAT | GACTGGAA | | |
| HEXA | ATCCTTCCAGTCAGG | TGGTACCTGAACCGTATATCCTATGGC | 13 | 25 |
| 15 | GCCAT | CCTGACTGGAA | | |
| HEXA | ATCCTTCCAGTCAGG | GTACCTGAACCGTATATCCTATGGCCC | 13 | 23 |
| 16 | GCCAT | TGACTGGAA | | |
| HEXA | ATCCTTCCAGTCAGG | AACCGTATATCCTATGGCCCTGACTG | 10 | 16 |
| 17 | GCCAT | | | |
| HEXA | ATCCTTCCAGTCAGG | TGAACCGTATATCCTATGGCCCTGACT | 10 | 18 |
| 18 | GCCAT | G | | |
| HEXA | ATCCTTCCAGTCAGG | TACCTGAACCGTATATCCTATGGCCCT | 10 | 22 |
| 19 | GCCAT | GACTG | | |
| HEXA | ATCCTTCCAGTCAGG | TGGTACCTGAACCGTATATCCTATGGC | 10 | 25 |
| 20 | GCCAT | CCTGACTG | | |

TABLE 3Q
FIGS. 50A-50B nicking sgRNA

| NICKING SGRNA | SPACER SEQUENCE |
|---|---|
| HBB_ED7A_+72 | GCCTTGATACCAACCTGCCCA |
| | (SEQ ID NO: 626) |
| HEXA_ED7B_+60 | GCTGGAACTGGTCACCAAGGC |
| | (SEQ ID NO: 627) |
| HEXA_ED7B_CORRECT_ | GTACCTGAACCGTATATCCTA |
| WT_PE3B | (SEQ ID NO: 628) |
| HEXA_ED7B_CORRECT_ | GTACCTGAACCGTATATCTTA |
| SILENT_PE3B | (SEQ ID NO: 629) |

TABLE 3R
FIGS. 51A-51G PEgRNA

| | | | | RT |
|---|---|---|---|---|
| | | | PBS | TEMPLATE |
| | SPACER SEQUENCE | 3′ EXTENSION (SEQ | LENGTH | LENGTH |
| PEGRNA | (SEQ ID NO: 632-640) | ID NO: 641-649) | (NT) | (NT) |
| HEK3_ED8_ | GGCCCAGACTGAGCA | TCTGCCATCCCGTGCTCAGT | 13 | 10 |
| 1TTOG | CGTGA | CTG | | |
| HEK3_ED8_ | GGCCCAGACTGAGCA | TCTGCCAGCACGTGCTCAGT | 13 | 10 |
| 3ATOC | CGTGA | CTG | | |
| HEK3_ED8_ | GGCCCAGACTGAGCA | TCTGCCAACACGTGCTCAGT | 13 | 10 |
| 3ATOT | CGTGA | CTG | | |
| HEK3_ED8_ | GGCCCAGACTGAGCA | TGGAGGAAGCAGGGCTTCC | 13 | 34 |
| 3ATOT_5- | CGTGA | TTTCCTCTGAAAACACGTGC | | |
| 6GGTOTT | | TCAGTCTG | | |
| HEK3_ED8_ | GGCCCAGACTGAGCA | TCTGCCATCAAAGCGTGCTC | 13 | 10 |
| 1CTTINS | CGTGA | AGTCTG | | |
| RNF2_ED8_ | GTCATCTTAGTCATTA | AACGAACACCTCATGTAATG | 15 | 14 |
| 1CTOA | CCTG | ACTAAGATG | | |
| RNF2_ED8_ | GTCATCTTAGTCATTA | AACGAACACCTCACGTAATG | 15 | 14 |
| 1CTOG | CCTG | ACTAAGATG | | |
| RNF2_ED8_ | GTCATCTTAGTCATTA | AACGAACACCTCAGTACGTA | 15 | 17 |
| 1GTAINS | CCTG | ATGACTAAGATG | | |
| HBB_ED8_ | GCATGGTGCACCTGAC | AGACTTCTCCACAGGAGTCA | 13 | 14 |
| 4ATOT | TCCTG | GGTGCAC | | |

TABLE 4
Sequences of primers used for mammalian cell genomic DNA amplification
and HTS¹⁸¹.

| DESCRIPTION | SEQUENCE (SEQ ID NOS: 3811-3863) |
|---|---|
| HEK3 FWD | ACACTCTTTCCCTACACGACGCTCTTCCGATCTNNNNATGTGGGCT |
| | GCCTAGAAAGG |
| HEK3 REV | TGGAGTTCAGACGTGTGCTCTTCCGATCTCCCAGCCAAACTTGTCA |
| | ACC |
| RNF2 FWD | ACACTCTTTCCCTACACGACGCTCTTCCGATCTNNNNACGTCTCAT |
| | ATGCCCCTTGG |
| RNF2 REV | TGGAGTTCAGACGTGTGCTCTTCCGATCTACGTAGGAATTTTGGTG |
| | GGACA |
| HEK4 FWD | ACACTCTTTCCCTACACGACGCTCTTCCGATCTNNNNGAACCCAG |
| | GTAGCCAGAGAC |
| HEK4 REV | TGGAGTTCAGACGTGTGCTCTTCCGATCTTCCTTTCAACCCGAACG |
| | GAG |
| EMX1 FWD | ACACTCTTTCCCTACACGACGCTCTTCCGATCTNNNNCAGCTCAGC |
| | CTGAGTGTTGA |
| EMX1 REV | TGGAGTTCAGACGTGTGCTCTTCCGATCTCTCGTGGGTTTGTGGTT |
| | GC |
| FANCF FWD | ACACTCTTTCCCTACACGACGCTCTTCCGATCTNNNNCATTGCAGA |
| | GAGGCGTATCA |
| FANCF REV | TGGAGTTCAGACGTGTGCTCTTCCGATCTGGGGTCCCAGGTGCTG |
| | AC |
| HBB FWD | ACACTCTTTCCCTACACGACGCTCTTCCGATCTNNNNAGGGTTGGC |
| | CAATCTACTCCC |
| HBB REV | TGGAGTTCAGACGTGTGCTCTTCCGATCTGTCTTCTCTGTCTCCAC |
| | ATGCC |
| PRNP FWD | ACACTCTTTCCCTACACGACGCTCTTCCGATCTNNNNGTCAGTGGA |
| | ACAAGCCGAGT |
| PRNP REV | TGGAGTTCAGACGTGTGCTCTTCCGATCTACTTGGTTGGGGTAACG |
| | GTG |
| HEXA FWD | ACACTCTTTCCCTACACGACGCTCTTCCGATCTNNNNCATACAGGT |
| | GTGGCGAGAGG |
| HEXA REV | TGGAGTTCAGACGTGTGCTCTTCCGATCTCCAGCCTCCTTTGGTTA |
| | GCA |
| RUNX1 FWD | ACACTCTTTCCCTACACGACGCTCTTCCGATCTNNNNTCACAAACA |
| | AGACAGGGAACTG |
| RUNX1 REV | TGGAGTTCAGACGTGTGCTCTTCCGATCTAGATGTAGGGCTAGAGG |
| | GGTG |
| VEGFA FWD | ACACTCTTTCCCTACACGACGCTCTTCCGATCTNNNNACTTGGTGC |
| | CAAATTCTTCTCC |
| VEGFA REV | TGGAGTTCAGACGTGTGCTCTTCCGATCTAAAGAGGGAATGGGCT |
| | TTGGA |
| DNMT FWD | ACACTCTTTCCCTACACGACGCTCTTCCGATCTNNNNCACAACAG |
| | CTTCATGTCAGCC |
| DNMT REV | TGGAGTTCAGACGTGTGCTCTTCCGATCTACGTTAATGTTTCCTGAT |
| | GGTCC |
| HEK3 OFF-TARGET | ACACTCTTTCCCTACACGACGCTCTTCCGATCTNNNNTCCCCTGTT |
| SITE 1 FWD | GACCTGGAGAA |
| HEK3 OFF-TARGET | TGGAGTTCAGACGTGTGCTCTTCCGATCTCACTGTACTTGCCCTGA |
| SITE 1 REV | CCA |
| HEK3 OFF-TARGET | ACACTCTTTCCCTACACGACGCTCTTCCGATCTNNNNTTGGTGTTG |
| SITE 2 FWD | ACAGGGAGCAA |
| HEK3 OFF-TARGET | TGGAGTTCAGACGTGTGCTCTTCCGATCTCTGAGATGTGGGCAGA |
| SITE 2 REV | AGGG |
| HEK3 OFF-TARGET | ACACTCTTTCCCTACACGACGCTCTTCCGATCTNNNNTGAGAGGG |
| SITE 3 FWD | AACAGAAGGGCT |
| HEK3 OFF-TARGET | TGGAGTTCAGACGTGTGCTCTTCCGATCTGTCCAAAGGCCCAAGA |
| SITE 3 REV | ACCT |
| HEK3 OFF-TARGET | ACACTCTTTCCCTACACGACGCTCTTCCGATCTNNNNTCCTAGCAC |
| SITE 4 FWD | TTTGGAAGGTCG |
| HEK3 OFF-TARGET | TGGAGTTCAGACGTGTGCTCTTCCGATCTGCTCATCTTAATCTGCT |
| SITE 4 REV | CAGCC |
| HEK4 OFF-TARGET | ACACTCTTTCCCTACACGACGCTCTTCCGATCTNNNNGGCATGGCT |
| SITE 1 FWD | TCTGAGACTCA |
| HEK4 OFF-TARGET | TGGAGTTCAGACGTGTGCTCTTCCGATCTGTCTCCCTTGCACTCCC |
| SITE 1 REV | TGTCTTT |
| HEK4 OFF-TARGET | ACACTCTTTCCCTACACGACGCTCTTCCGATCTNNNNTTTGGCAAT |
| SITE 2 FWD | GGAGGCATTGG |
| HEK4 OFF-TARGET | TGGAGTTCAGACGTGTGCTCTTCCGATCTGAAGAGGCTGCCCATG |
| SITE 2 REV | AGAG |
| HEK4 OFF-TARGET | ACACTCTTTCCCTACACGACGCTCTTCCGATCTNNNNGGTCTGAGG |
| SITE 3 FWD | CTCGAATCCTG |
| HEK4 OFF-TARGET | TGGAGTTCAGACGTGTGCTCTTCCGATCTCTGTGGCCTCCATATCC |
| SITE 3 REV | CTG |
| HEK4 OFF-TARGET | ACACTCTTTCCCTACACGACGCTCTTCCGATCTNNNNTTTCCACCA |
| SITE 4 FWD | GAACTCAGCCC |
| HEK4 OFF-TARGET | TGGAGTTCAGACGTGTGCTCTTCCGATCTCCTCGGTTCCTCCACAA |
| SITE 4 REV | CAC |
| EMX1 OFF-TARGET | ACACTCTTTCCCTACACGACGCTCTTCCGATCTNNNNGTGGGGAG |
| SITE 1 FWD | ATTTGCATCTGTGGAGG |
| EMX1 OFF-TARGET | TGGAGTTCAGACGTGTGCTCTTCCGATCTGCTTTTATACCATCTTGG |
| SITE 1 REV | GGTTACAG |
| EMX1 OFF-TARGET | ACACTCTTTCCCTACACGACGCTCTTCCGATCTNNNNCAATGTGCT |
| SITE 2 FWD | TCAACCCATCACGGC |
| EMX1 OFF-TARGET | TGGAGTTCAGACGTGTGCTCTTCCGATCTCCATGAATTTGTGATGG |
| SITE 2 REV | ATGCAGTCTG |
| EMX1 OFF-TARGET | ACACTCTTTCCCTACACGACGCTCTTCCGATCTNNNNGAGAAGGA |
| SITE 3 FWD | GGTGCAGGAGCTAGAC |
| EMX1 OFF-TARGET | TGGAGTTCAGACGTGTGCTCTTCCGATCTCATCCCGACCTTCATCC |
| SITE 3 REV | CTCCTGG |
| EMX1 OFF-TARGET | ACACTCTTTCCCTACACGACGCTCTTCCGATCTNNNNGTAGTTCTG |
| SITE 4 FWD | ACATTCCTCCTGAGGG |
| EMX1 OFF-TARGET | TGGAGTTCAGACGTGTGCTCTTCCGATCTTCAAACAAGGTGCAGA |
| SITE 4 REV | TACAGCA |
| FANCF OFF-TARGET | ACACTCTTTCCCTACACGACGCTCTTCCGATCTNNNNGCGGGCAG |
| SITE 1 FWD | TGGCGTCTTAGTCG |
| FANCF OFF-TARGET | TGGAGTTCAGACGTGTGCTCTTCCGATCTCCCTGGGTTTGGTTGGC |
| SITE 1 REV | TGCTC |
| FANCF OFF-TARGET | ACACTCTTTCCCTACACGACGCTCTTCCGATCTNNNNCTCCTTGCC |
| SITE 2 FWD | GCCCAGCCGGTC |
| FANCF OFF-TARGET | TGGAGTTCAGACGTGTGCTCTTCCGATCTCACTGGGGAAGAGGCG |
| SITE 2 REV | AGGACAC |
| FANCF OFF-TARGET | ACACTCTTTCCCTACACGACGCTCTTCCGATCTNNNNCCAGTGTTT |
| SITE 3 FWD | CCCATCCCCAACAC |
| FANCF OFF-TARGET | TGGAGTTCAGACGTGTGCTCTTCCGATCTGAATGGATCCCCCCCTA |
| SITE 3 REV | GAGCTC |
| FANCF OFF-TARGET | ACACTCTTTCCCTACACGACGCTCTTCCGATCTNNNNCAGGCCCAC |
| SITE 4 FWD | AGGTCCTTCTGGA |

TABLE 5
Sequences of 100-mer single-stranded DNA oligonucleotide donor templates used
in HDR experiments and in the creation of the HBB E6V HEK293T cell line.
Oligonucleotides are 100-103 nt in length with homology arms centered around
the site of the edit. Oligonucleotides were from Integrated DNA Technologies,
purified by PAGE.

| | |
|---|---|
| HEK3 +3 A TOT | GCTTCTCCAGCCCTGGCCTGGGTCAATCCTTGGGGCCCAGACTG |
| | AGCACGTGTTGGCAGAGGAAAGGAAGCCCTGCTTCCTCCAGAG |
| | GGCGTCGCAGGAC (SEQ ID NO: 717) |
| HEK3 +3 A TO T, +5,6 GG | GCTTCTCCAGCCCTGGCCTGGGTCAATCCTTGGGGCCCAGACTG |
| TO TT | AGCACGTGTTTTCAGAGGAAAGGAAGCCCTGCTTCCTCCAGAG |
| | GGCGTCGCAGGAC (SEQ ID NO: 718) |
| HEK3 +1 TTOG | GCTTCTCCAGCCCTGGCCTGGGTCAATCCTTGGGGCCCAGACTG |
| | AGCACGGGATGGCAGAGGAAAGGAAGCCCTGCTTCCTCCAGA |
| | GGGCGTCGCAGGAC (SEQ ID NO: 719) |
| HEK3 +3 A TOC | GCTTCTCCAGCCCTGGCCTGGGTCAATCCTTGGGGCCCAGACTG |
| | AGCACGTGCTGGCAGAGGAAAGGAAGCCCTGCTTCCTCCAGA |
| | GGGCGTCGCAGGAC (SEQ ID NO: 720) |
| HEK3 +1 CTT | GCTTCTCCAGCCCTGGCCTGGGTCAATCCTTGGGGCCCAGACTG |
| INSERTION | AGCACGCTTTGATGGCAGAGGAAAGGAAGCCCTGCTTCCTCCA |
| | GAGGGCGTCGCAGGAC (SEQ ID NO: 721) |
| RNF2 +1 CTOA | CCCAGTTTACACGTCTCATATGCCCCTTGGCAGTCATCTTAGTCA |
| | TTACATGAGGTGTTCGTTGTAACTCATATAAACTGAGTTCCCATG |
| | TTTTGCTTAA (SEQ ID NO: 722) |
| RNF2 +1 CTOG | CCCAGTTTACACGTCTCATATGCCCCTTGGCAGTCATCTTAGTCA |
| | TTACGTGAGGTGTTCGTTGTAACTCATATAAACTGAGTTCCCATG |
| | TTTTGCTTAA (SEQ ID NO: 723) |
| RNF2 +1 GTA | CAGTTTACACGTCTCATATGCCCCTTGGCAGTCATCTTAGTCATT |
| INSERTION | ACGTACTGAGGTGTTCGTTGTAACTCATATAAACTGAGTTCCCAT |
| | GTTTTGCTTA (SEQ ID NO: 724) |
| HBB E6V INSTALLATION | ACTTCATCCACGTTCACCTTGCCCCACAGGGCAGTAACGGCAG |
| (ALSO USED FOR | ACTTCTCCACAGGAGTCAGATGCACCATGGTGTCTGTTTGAGGT |
| CREATION OF THE HBB | TGCTAGTGAACAC (SEQ ID NO: 725) |
| E6V HEK293T CELL | |
| LINE) | |
| HBB E6V CORRECTION | ACTTCATCCACGTTCACCTTGCCCCACAGGGCAGTAACGGCAG |
| PROTOSPACER A | ACTTCTCCTCAGGAGTCAGGTGCACCATGGTGTCTGTTTGAGGT |
| | TGCTAGTGAACAC (SEQ ID NO: 726) |
| HBB E6V CORRECTION | GTGTTCACTAGCAACCTCAAACAGACACCATGGTGCACCTGAC |
| PROTOSPACER B | TCCTGAGGAGAAGTCTGCCGTTACTGCCCTGTGGGGCAAGGTG |
| | AACGTGGATGAAGT (SEQ ID NO: 727) |
| HBB E6V CORRECTION | GTGTTCACTAGCAACCTCAAACAGACACCATGGTGCACCTGAC |
| PROTOSPACER B, | TCCTGATGAGAAGTCTGCCGTTACTGCCCTGTGGGGCAAGGTG |
| SILENT PAM MUTATION | AACGTGGATGAAGT (SEQ ID NO: 728) |
| PRNP G127V | CACATGGCTGGTGCTGCAGCAGCTGGGGCAGTGGTGGGGGGCC |
| | TTGGCGTCTACATGCTGGGAAGTGCCATGAGCAGGCCCATCATA |
| | CATTTCGGCAGTG (SEQ ID NO: 729) |

[1661] Additional Sequences

[1662] Sequences of Yeast Dual Fluorescent Reporter Plasmids Used Herein

p425-GFP_stop_mCherry:
(SEQ ID NO: 730)
ATGTCTAAAGGTGAAGAATTATTCACTGGTGTTGTCCCAATTTTGGTTGAATTAGATGGTGATG
TTAATGGTCACAAATTTTCTGTCTCCGGTGAAGGTGAAGGTGATGCTACTTACGGTAAATTGA
CCTTAAAATTTATTTGTACTACTGGTAAATTGCCAGTTCCATGGCCAACCTTAGTCACTACTTTC
GGTTATGGTGTTCAATGTTTTGCTAGATACCCAGATCATATGAAACAACATGACTTTTTCAAGT
CTGCCATGCCAGAAGGTTATGTTCAAGAAAGAACTATTTTTTTCAAAGATGACGGTAACTACA
AGACCAGAGCTGAAGTCAAGTTTGAAGGTGATACCTTAGTTAATAGAATCGAATTAAAAGGTA
TTGATTTTAAAGAAGATGGTAACATTTTAGGTCACAAATTGGAATACAACTATAACTCTCACAA
TGTTTACATCATGGCTGACAAACAAAAGAATGGTATCAAAGTTAACTTCAAAATTAGACACAA
CATTGAAGATGGTTCTGTTCAATTAGCTGACCATTATCAACAAAATACTCCAATTGGTGATGGT
CCAGTCTTGTTACCAGACAACCATTACTTATCCACTCAATCTGCCTTATCCAAAGATCCAAACG
AAAAGAGAGACCACATGGTCTTGTTAGAATTTGTTACTGCTGCTGGTATTACCCATGGTATGGA
TGAATTGTACAAAGCTAGCAACCTGGGTCAATCCTTGGGGCCCAGACTGAGCACGTGATGG
CAGAGCACAGGAGACGTCATGGTTTCAAAAGGTGAAGAAGATAATATGGCTATTATTAAAGAATTTA
TGAGATTTAAAGTTCATATGGAAGGTTCAGTTAATGGTCATGAATTTGAAATTGAAGGTGAAGGTGAA
GGTAGACCATATGAAGGTACTCAAACTGCTAAATTGAAAGTTACTAAAGGTGGTCCATTACCATTTGC
TTGGGATATTTTGTCACCACAATTTATGTATGGTTCAAAAGCTTATGTTAAACATCCAGCTGATATTCCA
GATTATTTAAAATTGTCATTTCCAGAAGGTTTTAAATGGGAAAGAGTTATGAATTTTGAAGATGGTGGT
GTTGTTACTGTTACTCAAGATTCATCATTACAAGATGGTGAATTTATTTATAAAGTTAAATTGAGAGGTA
CTAATTTTCCATCAGATGGTCCAGTTATGCAAAAAAAAACTATGGGTTGGGAAGCTTCATCAGAAAGA
ATGTATCCAGAAGATGGTGCTTTAAAAGGTGAAATTAAACAAAGATTGAAATTAAAAGATGGTGGTCA
TTATGATGCTGAAGTTAAAACTACTTATAAAGCTAAAAAACCAGTTCAATTACCAGGTGCTTATAATGTT
AATATTAAATTGGATATTACTTCACATAATGAAGATTATACTATTGTTGAACAATATGAAAGAGCTGAAG
GTAGACATTCAACTGGTGGTATGGATGAATTATATAAAGGTACCGCTCGAGCAGCTGTGATTGATTGA
GTCGACTTGGTTGAACACGTTGCCAAGGCTTAAGTGAATTTACTTTAAATCTTGCATTTAAATA
AATTTTCTTTTTATAGCTTTATGACTTAGTTTCAATTTATATACTATTTTAATGACATTTTCGATTC
GGATCCACTAGTTCTAGAGCGGCCGCCACCGCGGTGGAGCTCCAGCTTTTGTTCCCTTTAGTG
AGGGTTAATTGCGCGCTTGGCGTAATCATGGTCATAGCTGTTTCCTGTGTGAAATTGTTATCCG
CTCACAATTCCACACAACATAGGAGCCGGAAGCATAAAGTGTAAAGCCTGGGGTGCCTAATG
AGTGAGGTAACTCACATTAATTGCGTTGCGCTCACTGCCCGCTTTCCAGTCGGGAAACCTGTC
GTGCCAGCTGCATTAATGAATCGGCCAACGCGCGGGGAGAGGCGGTTTGCGTATTGGGCGCT
CTTCCGCTTCCTCGCTCACTGACTCGCTGCGCTCGGTCGTTCGGCTGCGGCGAGCGGTATCAG
CTCACTCAAAGGCGGTAATACGGTTATCCACAGAATCAGGGGATAACGCAGGAAAGAACATG
TGAGCAAAAGGCCAGCAAAAGGCCAGGAACCGTAAAAAGGCCGCGTTGCTGGCGTTTTTCC
ATAGGCTCCGCCCCCCTGACGAGCATCACAAAAATCGACGCTCAAGTCAGAGGTGGCGAAAC
CCGACAGGACTATAAAGATACCAGGCGTTTCCCCCTGGAAGCTCCCTCGTGCGCTCTCCTGTT
CCGACCCTGCCGCTTACCGGATACCTGTCCGCCTTTCTCCCTTCGGGAAGCGTGGCGCTTTCT
CATAGCTCACGCTGTAGGTATCTCAGTTCGGTGTAGGTCGTTCGCTCCAAGCTGGGCTGTGTG
CACGAACCCCCCGTTCAGCCCGACCGCTGCGCCTTATCCGGTAACTATCGTCTTGAGTCCAAC
CCGGTAAGACACGACTTATCGCCACTGGCAGCAGCCACTGGTAACAGGATTAGCAGAGCGAG
GTATGTAGGCGGTGCTACAGAGTTCTTGAAGTGGTGGCCTAACTACGGCTACACTAGAAGGAC
AGTATTTGGTATCTGCGCTCTGCTGAAGCCAGTTACCTTCGGAAAAAGAGTTGGTAGCTCTTG
ATCCGGCAAACAAACCACCGCTGGTAGCGGTGGTTTTTTTGTTTGCAAGCAGCAGATTACGCG
CAGAAAAAAAGGATCTCAAGAAGATCCTTTGATCTTTTCTACGGGGTCTGACGCTCAGTGGA
ACGAAAACTCACGTTAAGGGATTTTGGTCATGAGATTATCAAAAAGGATCTTCACCTAGATCC
TTTTAAATTAAAAATGAAGTTTTAAATCAATCTAAAGTATATATGAGTAAACTTGGTCTGACAG
TTACCAATGCTTAATCAGTGAGGCACCTATCTCAGCGATCTGTCTATTTCGTTCATCCATAGTTG
CCTGACTCCCCGTCGTGTAGATAACTACGATACGGGAGGGCTTACCATCTGGCCCCAGTGCTG
CAATGATACCGCGAGACCCACGCTCACCGGCTCCAGATTTATCAGCAATAAACCAGCCAGCCG
GAAGGGCCGAGCGCAGAAGTGGTCCTGCAACTTTATCCGCCTCCATCCAGTCTATTAATTGTT
GCCGGGAAGCTAGAGTAAGTAGTTCGCCAGTTAATAGTTTGCGCAACGTTGTTGCCATTGCTA
CAGGCATCGTGGTGTCACGCTCGTCGTTTGGTATGGCTTCATTCAGCTCCGGTTCCCAACGATC
AAGGCGAGTTACATGATCCCCCATGTTGTGCAAAAAAGCGGTTAGCTCCTTCGGTCCTCCGAT
CGTTGTCAGAAGTAAGTTGGCCGCAGTGTTATCACTCATGGTTATGGCAGCACTGCATAATTCT
CTTACTGTCATGCCATCCGTAAGATGCTTTTCTGTGACTGGTGAGTACTCAACCAAGTCATTCT
GAGAATAGTGTATGCGGCGACCGAGTTGCTCTTGCCCGGCGTCAATACGGGATAATACCGCGC
CACATAGCAGAACTTTAAAAGTGCTCATCATTGGAAAACGTTCTTCGGGGCGAAAACTCTCA
AGGATCTTACCGCTGTTGAGATCCAGTTCGATGTAACCCACTCGTGCACCCAACTGATCTTCA
GCATCTTTTACTTTCACCAGCGTTTCTGGGTGAGCAAAAACAGGAAGGCAAAATGCCGCAAA
AAAGGGAATAAGGGCGACACGGAAATGTTGAATACTCATACTCTTCCTTTTTCAATATTATTGA
AGCATTTATCAGGGTTATTGTCTCATGAGCGGATACATATTTGAATGTATTTAGAAAAATAAACA
AATAGGGGTTCCGCGCACATTTCCCCGAAAAGTGCCACCTGAACGAAGCATCTGTGCTTCATT
TTGTAGAACAAAAATGCAACGCGAGAGCGCTAATTTTTCAAACAAAGAATCTGAGCTGCATTT
TTACAGAACAGAAATGCAACGCGAAAGCGCTATTTTACCAACGAAGAATCTGTGCTTCATTTT
TGTAAAACAAAAATGCAACGCGAGAGCGCTAATTTTTCAAACAAAGAATCTGAGCTGCATTTT
TACAGAACAGAAATGCAACGCGAGAGCGCTATTTTACCAACAAAGAATCTATACTTCTTTTTT
GTTCTACAAAAATGCATCCCGAGAGCGCTATTTTTCTAACAAAGCATCTTAGATTACTTTTTTTC
TCCTTTGTGCGCTCTATAATGCAGTCTCTTGATAACTTTTTGCACTGTAGGTCCGTTAAGGTTAG
AAGAAGGCTACTTTGGTGTCTATTTTCTCTTCCATAAAAAAAGCCTGACTCCACTTCCCGCGTT
TACTGATTACTAGCGAAGCTGCGGGTGCATTTTTTCAAGATAAAGGCATCCCCGATTATATTCT
ATACCGATGTGGATTGCGCATACTTTGTGAACAGAAAGTGATAGCGTTGATGATTCTTCATTGG
TCAGAAAATTATGAACGGTTTCTTCTATTTTGTCTCTATATACTACGTATAGGAAATGTTTACATT
TTCGTATTGTTTTCGATTCACTCTATGAATAGTTCTTACTACAATTTTTTTGTCTAAAGAGTAATA
CTAGAGATAAACATAAAAAATGTAGAGGTCGAGTTTAGATGCAAGTTCAAGGAGCGAAAGGT
GGATGGGTAGGTTATATAGGGATATAGCACAGAGATATATAGCAAAGAGATACTTTTGAGCAAT
GTTTGTGGAAGCGGTATTCGCAATATTTTAGTAGCTCGTTACAGTCCGGTGCGTTTTTGGTTTT
TTGAAAGTGCGTCTTCAGAGCGCTTTTGGTTTTCAAAAGCGCTCTGAAGTTCCTATACTTTCTA
GAGAATAGGAACTTCGGAATAGGAACTTCAAAGCGTTTCCGAAAACGAGCGCTTCCGAAAAT
GCAACGCGAGCTGCGCACATACAGCTCACTGTTCACGTCGCACCTATATCTGCGTGTTGCCTG
TATATATATATACATGAGAAGAACGGCATAGTGCGTGTTTATGCTTAAATGCGTACTTATATGCGT
CTATTTATGTAGGATGAAAGGTAGTCTAGTACCTCCTGTGATATTATCCCATTCCATGCGGGGTA
TCGTATGCTTCCTTCAGCACTACCCTTTAGCTGTTCTATATGCTGCCACTCCTCAATTGGATTAG
TCTCATCCTTCAATGCTATCATTTCCTTTGATATTGGATCATACTAAGAAACCATTATTATCATGA
CATTAACCTATAAAAATAGGCGTATCACGAGGCCCTTTCGTCTCGCGCGTTTCGGTGATGACGG
TGAAAACCTCTGACACATGCAGCTCCCGGAGACGGTCACAGCTTGTCTGTAAGCGGATGCCG
GGAGCAGACAAGCCCGTCAGGGCGCGTCAGCGGGTGTTGGCGGGTGTCGGGGCTGGCTTAA
CTATGCGGCATCAGAGCAGATTGTACTGAGAGTGCACCATATCGACTACGTCGTAAGGCCGTT
TCTGACAGAGTAAAATTCTTGAGGGAACTTTCACCATTATGGGAAATGCTTCAAGAAGGTATT
GACTTAAACTCCATCAAATGGTCAGGTCATTGAGTGTTTTTTATTTGTTGTATTTTTTTTTTTTTA
GAGAAAATCCTCCAATATCAAATTAGGAATCGTAGTTTCATGATTTTCTGTTACACCTAACTTTT
TGTGTGGTGCCCTCCTCCTTGTCAATATTAATGTTAAAGTGCAATTCTTTTTCCTTATCACGTTG
AGCCATTAGTATCAATTTGCTTACCTGTATTCCTTTACTATCCTCCTTTTTCTCCTTCTTGATAAA
TGTATGTAGATTGCGTATATAGTTTCGTCTACCCTATGAACATATTCCATTTTGTAATTTCGTGTC
GTTTCTATTATGAATTTCATTTATAAAGTTTATGTACAAATATCATAAAAAAAGAGAATCTTTTTA
AGCAAGGATTTTCTTAACTTCTTCGGCGACAGCATCACCGACTTCGGTGGTACTGTTGGAACC
ACCTAAATCACCAGTTCTGATACCTGCATCCAAAACCTTTTTAACTGCATCTTCAATGGCCTTA
CCTTCTTCAGGCAAGTTCAATGACAATTTCAACATCATTGCAGCAGACAAGATAGTGGCGATA
GGGTCAACCTTATTCTTTGGCAAATCTGGAGCAGAACCGTGGCATGGTTCGTACAAACCAAAT
GCGGTGTTCTTGTCTGGCAAAGAGGCCAAGGACGCAGATGGCAACAAACCCAAGGAACCTG
GGATAACGGAGGCTTCATCGGAGATGATATCACCAAACATGTTGCTGGTGATTATAATACCATT
TAGGTGGGTTGGGTTCTTAACTAGGATCATGGCGGCAGAATCAATCAATTGATGTTGAACCTTC
AATGTAGGGAATTCGTTCTTGATGGTTTCCTCCACAGTTTTTCTCCATAATCTTGAAGAGGCCA
AAAGATTAGCTTTATCCAAGGACCAAATAGGCAATGGTGGCTCATGTTGTAGGGCCATGAAAG
CGGCCATTCTTGTGATTCTTTGCACTTCTGGAACGGTGTATTGTTCACTATCCCAAGCGACACC
ATCACCATCGTCTTCCTTTCTCTTACCAAAGTAAATACCTCCCACTAATTCTCTGACAACAACG
AAGTCAGTACCTTTAGCAAATTGTGGCTTGATTGGAGATAAGTCTAAAAGAGAGTCGGATGCA
AAGTTACATGGTCTTAAGTTGGCGTACAATTGAAGTTCTTTACGGATTTTTAGTAAACCTTGTT
CAGGTCTAACACTACCGGTACCCCATTTAGGACCAGCCACAGCACCTAACAAAACGGCATCA
ACCTTCTTGGAGGCTTCCAGCGCCTCATCTGGAAGTGGGACACCTGTAGCATCGATAGCAGCA
CCACCAATTAAATGATTTTCGAAATCGAACTTGACATTGGAACGAACATCAGAAATAGCTTTA
AGAACCTTAATGGCTTCGGCTGTGATTTCTTGACCAACGTGGTCACCTGGCAAAACGACGATC
TTCTTAGGGGCAGACATAGGGGCAGACATTAGAATGGTATATCCTTGAAATATATATATATATTG
CTGAAATGTAAAAGGTAAGAAAAGTTAGAAAGTAAGACGATTGCTAACCACCTATTGGAAAA
AACAATAGGTCCTTAAATAATATTGTCAACTTCAAGTATTGTGATGCAAGCATTTAGTCATGAA
CGCTTCTCTATTCTATATGAAAAGCCGGTTCCGGCCTCTCACCTTTCCTTTTTCTCCCAATTTTT
CAGTTGAAAAAGGTATATGCGTCAGGCGACCTCTGAAATTAACAAAAAATTTCCAGTCATCGA
ATTTGATTCTGTGCGATAGCGCCCCTGTGTGTTCTCGTTATGTTGAGGAAAAAAATAATGGTTG
CTAAGAGATTCGAACTCTTGCATCTTACGATACCTGAGTATTCCCACAGTTAACTGCGGTCAAG
ATATTTCTTGAATCAGGCGCCTTAGACCGCTCGGCCAAACAACCAATTACTTGTTGAGAAATA
GAGTATAATTATCCTATAAATATAACGTTTTTGAACACACATGAACAAGGAAGTACAGGACAAT
TGATTTTGAAGAGAATGTGGATTTTGATGTAATTGTTGGGATTCCATTTTTAATAAGGCAATAAT
ATTAGGTATGTGGATATACTAGAAGTTCTCCTCGACCGTCGATATGCGGTGTGAAATACCGCAC
AGATGCGTAAGGAGAAAATACCGCATCAGGAAATTGTAAACGTTAATATTTTGTTAAAATTCGC
GTTAAATTTTTGTTAAATCAGCTCATTTTTTAACCAATAGGCCGAAATCGGCAAAATCCCTTATA
AATCAAAAGAATAGACCGAGATAGGGTTGAGTGTTGTTCCAGTTTGGAACAAGAGTCCACTAT
TAAAGAACGTGGACTCCAACGTCAAAGGGCGAAAAACCGTCTATCAGGGCGATGGCCCACTA
CGTGAACCATCACCCTAATCAAGTTTTTTGGGGTCGAGGTGCCGTAAAGCACTAAATCGGAAC
CCTAAAGGGAGCCCCCGATTTAGAGCTTGACGGGGAAAGCCGGCGAACGTGGCGAGAAAGG
AAGGGAAGAAAGCGAAAGGAGCGGGCGCTAGGGCGCTGGCAAGTGTAGCGGTCACGCTGC
GCGTAACCACCACACCCGCCGCGCTTAATGCGCCGCTACAGGGCGCGTCGCGCCATTCGCCAT
TCAGGCTGCGCAACTGTTGGGAAGGGCGATCGGTGCGGGCCTCTTCGCTATTACGCCAGCTG
GCGAAAGGGGGATGTGCTGCAAGGCGATTAAGTTGGGTAACGCCAGGGTTTTCCCAGTCACG
ACGTTGTAAAACGACGGCCAGTGAGCGCGCGTAATACGACTCACTATAGGGCGAATTGGGTA
CCGGGCCCCCCCTCGAGGTCGACGGTATCGATAAGCTTGATATCGAATTCCTGCAGCCCGGGG
GATCCGTTAGAATCATTTTGAATAAAAAACACGCTTTTTCAGTTCGAGTTTATCATTATCAATAC
TGCCATTTCAAAGAATACGTAAATAATTAATAGTAGTGATTTTCCTAACTTTATTTAGTCAAAAA
ATTAGCCTTTTAATTCTGCTGTAACCCGTACATGCCCAAAATAGGGGGCGGGTTACACAGAATA
TATAACATCGTAGGTGTCTGGGTGAACAGTTTATTCCTGGCATCCACTAAATATAATGGAGCCC
GCTTTTTAAGCTGGCATCCAGAAAAAAAAAGAATCCCAGCACCAAAATATTGTTTTCTTCACC
AACCATCAGTTCATAGGTCCATTCTCTTAGCGCAACTACAGAGAACAGGGGCACAAACAGGC
AAAAAACGGGCACAACCTCAATGGAGTGATGCAACCTGCCTGGAGTAAATGATGACACAAGG
CAATTGACCCACGCATGTATCTATCTCATTTTCTTACACCTTCTATTACCTTCTGCTCTCTCTGAT
TTGGAAAAAGCTGAAAAAAAAGGTTGAAACCAGTTCCCTGAAATTATTCCCCTACTTGACTA
ATAAGTATATAAAGACGGTAGGTATTGATTGTAATTCTGTAAATCTATTTCTTAAACTTCTTAAAT
TCTACTTTTATAGTTAGTCTTTTTTTTAGTTTTAAAACACCAAGAACTTAGTTTCGAATAAACAC
ACATAAACAAACAAAGAATTC
p425-GFP_+1fs_mCherry:
(SEQ ID NO: 731)
ATGTCTAAAGGTGAAGAATTATTCACTGGTGTTGTCCCAATTTTGGTTGAATTAGATGGTGATG
TTAATGGTCACAAATTTTCTGTCTCCGGTGAAGGTGAAGGTGATGCTACTTACGGTAAATTGA
CCTTAAAATTTATTTGTACTACTGGTAAATTGCCAGTTCCATGGCCAACCTTAGTCACTACTTTC
GGTTATGGTGTTCAATGTTTTGCTAGATACCCAGATCATATGAAACAACATGACTTTTTCAAGT
CTGCCATGCCAGAAGGTTATGTTCAAGAAAGAACTATTTTTTTCAAAGATGACGGTAACTACA
AGACCAGAGCTGAAGTCAAGTTTGAAGGTGATACCTTAGTTAATAGAATCGAATTAAAAGGTA
TTGATTTTAAAGAAGATGGTAACATTTTAGGTCACAAATTGGAATACAACTATAACTCTCACAA
TGTTTACATCATGGCTGACAAACAAAAGAATGGTATCAAAGTTAACTTCAAAATTAGACACAA
CATTGAAGATGGTTCTGTTCAATTAGCTGACCATTATCAACAAAATACTCCAATTGGTGATGGT
CCAGTCTTGTTACCAGACAACCATTACTTATCCACTCAATCTGCCTTATCCAAAGATCCAAACG
AAAAGAGAGACCACATGGTCTTGTTAGAATTTGTTACTGCTGCTGGTATTACCCATGGTATGGA
TGAATTGTACAAAGCTAGCAAACCTGGGTCAATCCTTGGGGCCCAGACTGAGCACGTGATG
GCAGAGCACAGGAGACGTCATGGTTTCAAAAGGTGAAGAAGATAATATGGCTATTATTAAAGAATTT
ATGAGATTTAAAGTTCATATGGAAGGTTCAGTTAATGGTCATGAATTTGAAATTGAAGGTGAAGGTGA
AGGTAGACCATATGAAGGTACTCAAACTGCTAAATTGAAAGTTACTAAAGGTGGTCCATTACCATTTG
CTTGGGATATTTTGTCACCACAATTTATGTATGGTTCAAAAGCTTATGTTAAACATCCAGCTGATATTCC
AGATTATTTAAAATTGTCATTTCCAGAAGGTTTTAAATGGGAAAGAGTTATGAATTTTGAAGATGGTGG
TGTTGTTACTGTTACTCAAGATTCATCATTACAAGATGGTGAATTTATTTATAAAGTTAAATTGAGAGGT
ACTAATTTTCCATCAGATGGTCCAGTTATGCAAAAAAAAACTATGGGTTGGGAAGCTTCATCAGAAAG
AATGTATCCAGAAGATGGTGCTTTAAAAGGTGAAATTAAACAAAGATTGAAATTAAAAGATGGTGGTC
ATTATGATGCTGAAGTTAAAACTACTTATAAAGCTAAAAAACCAGTTCAATTACCAGGTGCTTATAATGT
TAATATTAAATTGGATATTACTTCACATAATGAAGATTATACTATTGTTGAACAATATGAAAGAGCTGAAG
GTAGACATTCAACTGGTGGTATGGATGAATTATATAAAGGTACCGCTCGAGCAGCTGTGATTGATTGA
GTCGACTTGGTTGAACACGTTGCCAAGGCTTAAGTGAATTTACTTTAAATCTTGCATTTAAATA
AATTTTCTTTTTATAGCTTTATGACTTAGTTTCAATTTATATACTATTTTAATGACATTTTCGATTC
GGATCCACTAGTTCTAGAGCGGCCGCCACCGCGGTGGAGCTCCAGCTTTTGTTCCCTTTAGTG
AGGGTTAATTGCGCGCTTGGCGTAATCATGGTCATAGCTGTTTCCTGTGTGAAATTGTTATCCG
CTCACAATTCCACACAACATAGGAGCCGGAAGCATAAAGTGTAAAGCCTGGGGTGCCTAATG
AGTGAGGTAACTCACATTAATTGCGTTGCGCTCACTGCCCGCTTTCCAGTCGGGAAACCTGTC
GTGCCAGCTGCATTAATGAATCGGCCAACGCGCGGGGAGAGGCGGTTTGCGTATTGGGCGCT
CTTCCGCTTCCTCGCTCACTGACTCGCTGCGCTCGGTCGTTCGGCTGCGGCGAGCGGTATCAG
CTCACTCAAAGGCGGTAATACGGTTATCCACAGAATCAGGGGATAACGCAGGAAAGAACATG
TGAGCAAAAGGCCAGCAAAAGGCCAGGAACCGTAAAAAGGCCGCGTTGCTGGCGTTTTTCC
ATAGGCTCCGCCCCCCTGACGAGCATCACAAAAATCGACGCTCAAGTCAGAGGTGGCGAAAC
CCGACAGGACTATAAAGATACCAGGCGTTTCCCCCTGGAAGCTCCCTCGTGCGCTCTCCTGTT
CCGACCCTGCCGCTTACCGGATACCTGTCCGCCTTTCTCCCTTCGGGAAGCGTGGCGCTTTCT
CATAGCTCACGCTGTAGGTATCTCAGTTCGGTGTAGGTCGTTCGCTCCAAGCTGGGCTGTGTG
CACGAACCCCCCGTTCAGCCCGACCGCTGCGCCTTATCCGGTAACTATCGTCTTGAGTCCAAC
CCGGTAAGACACGACTTATCGCCACTGGCAGCAGCCACTGGTAACAGGATTAGCAGAGCGAG
GTATGTAGGCGGTGCTACAGAGTTCTTGAAGTGGTGGCCTAACTACGGCTACACTAGAAGGAC
AGTATTTGGTATCTGCGCTCTGCTGAAGCCAGTTACCTTCGGAAAAAGAGTTGGTAGCTCTTG
ATCCGGCAAACAAACCACCGCTGGTAGCGGTGGTTTTTTTGTTTGCAAGCAGCAGATTACGCG
CAGAAAAAAAGGATCTCAAGAAGATCCTTTGATCTTTTCTACGGGGTCTGACGCTCAGTGGA
ACGAAAACTCACGTTAAGGGATTTTGGTCATGAGATTATCAAAAAGGATCTTCACCTAGATCC
TTTTAAATTAAAAATGAAGTTTTAAATCAATCTAAAGTATATATGAGTAAACTTGGTCTGACAG
TTACCAATGCTTAATCAGTGAGGCACCTATCTCAGCGATCTGTCTATTTCGTTCATCCATAGTTG
CCTGACTCCCCGTCGTGTAGATAACTACGATACGGGAGGGCTTACCATCTGGCCCCAGTGCTG
CAATGATACCGCGAGACCCACGCTCACCGGCTCCAGATTTATCAGCAATAAACCAGCCAGCCG
GAAGGGCCGAGCGCAGAAGTGGTCCTGCAACTTTATCCGCCTCCATCCAGTCTATTAATTGTT
GCCGGGAAGCTAGAGTAAGTAGTTCGCCAGTTAATAGTTTGCGCAACGTTGTTGCCATTGCTA
CAGGCATCGTGGTGTCACGCTCGTCGTTTGGTATGGCTTCATTCAGCTCCGGTTCCCAACGATC
AAGGCGAGTTACATGATCCCCCATGTTGTGCAAAAAAGCGGTTAGCTCCTTCGGTCCTCCGAT
CGTTGTCAGAAGTAAGTTGGCCGCAGTGTTATCACTCATGGTTATGGCAGCACTGCATAATTCT
CTTACTGTCATGCCATCCGTAAGATGCTTTTCTGTGACTGGTGAGTACTCAACCAAGTCATTCT
GAGAATAGTGTATGCGGCGACCGAGTTGCTCTTGCCCGGCGTCAATACGGGATAATACCGCGC
CACATAGCAGAACTTTAAAAGTGCTCATCATTGGAAAACGTTCTTCGGGGCGAAAACTCTCA
AGGATCTTACCGCTGTTGAGATCCAGTTCGATGTAACCCACTCGTGCACCCAACTGATCTTCA
GCATCTTTTACTTTCACCAGCGTTTCTGGGTGAGCAAAAACAGGAAGGCAAAATGCCGCAAA
AAAGGGAATAAGGGCGACACGGAAATGTTGAATACTCATACTCTTCCTTTTTCAATATTATTGA
AGCATTTATCAGGGTTATTGTCTCATGAGCGGATACATATTTGAATGTATTTAGAAAAATAAACA
AATAGGGGTTCCGCGCACATTTCCCCGAAAAGTGCCACCTGAACGAAGCATCTGTGCTTCATT
TTGTAGAACAAAAATGCAACGCGAGAGCGCTAATTTTTCAAACAAAGAATCTGAGCTGCATTT
TTACAGAACAGAAATGCAACGCGAAAGCGCTATTTTACCAACGAAGAATCTGTGCTTCATTTT
TGTAAAACAAAAATGCAACGCGAGAGCGCTAATTTTTCAAACAAAGAATCTGAGCTGCATTTT
TACAGAACAGAAATGCAACGCGAGAGCGCTATTTTACCAACAAAGAATCTATACTTCTTTTTT
GTTCTACAAAAATGCATCCCGAGAGCGCTATTTTTCTAACAAAGCATCTTAGATTACTTTTTTTC
TCCTTTGTGCGCTCTATAATGCAGTCTCTTGATAACTTTTTGCACTGTAGGTCCGTTAAGGTTAG
AAGAAGGCTACTTTGGTGTCTATTTTCTCTTCCATAAAAAAAGCCTGACTCCACTTCCCGCGTT
TACTGATTACTAGCGAAGCTGCGGGTGCATTTTTTCAAGATAAAGGCATCCCCGATTATATTCT
ATACCGATGTGGATTGCGCATACTTTGTGAACAGAAAGTGATAGCGTTGATGATTCTTCATTGG
TCAGAAAATTATGAACGGTTTCTTCTATTTTGTCTCTATATACTACGTATAGGAAATGTTTACATT
TTCGTATTGTTTTCGATTCACTCTATGAATAGTTCTTACTACAATTTTTTTGTCTAAAGAGTAATA
CTAGAGATAAACATAAAAAATGTAGAGGTCGAGTTTAGATGCAAGTTCAAGGAGCGAAAGGT
GGATGGGTAGGTTATATAGGGATATAGCACAGAGATATATAGCAAAGAGATACTTTTGAGCAAT
GTTTGTGGAAGCGGTATTCGCAATATTTTAGTAGCTCGTTACAGTCCGGTGCGTTTTTGGTTTT
TTGAAAGTGCGTCTTCAGAGCGCTTTTGGTTTTCAAAAGCGCTCTGAAGTTCCTATACTTTCTA
GAGAATAGGAACTTCGGAATAGGAACTTCAAAGCGTTTCCGAAAACGAGCGCTTCCGAAAAT
GCAACGCGAGCTGCGCACATACAGCTCACTGTTCACGTCGCACCTATATCTGCGTGTTGCCTG
TATATATATATACATGAGAAGAACGGCATAGTGCGTGTTTATGCTTAAATGCGTACTTATATGCGT
CTATTTATGTAGGATGAAAGGTAGTCTAGTACCTCCTGTGATATTATCCCATTCCATGCGGGGTA
TCGTATGCTTCCTTCAGCACTACCCTTTAGCTGTTCTATATGCTGCCACTCCTCAATTGGATTAG
TCTCATCCTTCAATGCTATCATTTCCTTTGATATTGGATCATACTAAGAAACCATTATTATCATGA
CATTAACCTATAAAAATAGGCGTATCACGAGGCCCTTTCGTCTCGCGCGTTTCGGTGATGACGG
TGAAAACCTCTGACACATGCAGCTCCCGGAGACGGTCACAGCTTGTCTGTAAGCGGATGCCG
GGAGCAGACAAGCCCGTCAGGGCGCGTCAGCGGGTGTTGGCGGGTGTCGGGGCTGGCTTAA
CTATGCGGCATCAGAGCAGATTGTACTGAGAGTGCACCATATCGACTACGTCGTAAGGCCGTT
TCTGACAGAGTAAAATTCTTGAGGGAACTTTCACCATTATGGGAAATGCTTCAAGAAGGTATT
GACTTAAACTCCATCAAATGGTCAGGTCATTGAGTGTTTTTTATTTGTTGTATTTTTTTTTTTTTA
GAGAAAATCCTCCAATATCAAATTAGGAATCGTAGTTTCATGATTTTCTGTTACACCTAACTTTT
TGTGTGGTGCCCTCCTCCTTGTCAATATTAATGTTAAAGTGCAATTCTTTTTCCTTATCACGTTG
AGCCATTAGTATCAATTTGCTTACCTGTATTCCTTTACTATCCTCCTTTTTCTCCTTCTTGATAAA
TGTATGTAGATTGCGTATATAGTTTCGTCTACCCTATGAACATATTCCATTTTGTAATTTCGTGTC
GTTTCTATTATGAATTTCATTTATAAAGTTTATGTACAAATATCATAAAAAAAGAGAATCTTTTTA
AGCAAGGATTTTCTTAACTTCTTCGGCGACAGCATCACCGACTTCGGTGGTACTGTTGGAACC
ACCTAAATCACCAGTTCTGATACCTGCATCCAAAACCTTTTTAACTGCATCTTCAATGGCCTTA
CCTTCTTCAGGCAAGTTCAATGACAATTTCAACATCATTGCAGCAGACAAGATAGTGGCGATA
GGGTCAACCTTATTCTTTGGCAAATCTGGAGCAGAACCGTGGCATGGTTCGTACAAACCAAAT
GCGGTGTTCTTGTCTGGCAAAGAGGCCAAGGACGCAGATGGCAACAAACCCAAGGAACCTG
GGATAACGGAGGCTTCATCGGAGATGATATCACCAAACATGTTGCTGGTGATTATAATACCATT
TAGGTGGGTTGGGTTCTTAACTAGGATCATGGCGGCAGAATCAATCAATTGATGTTGAACCTTC
AATGTAGGGAATTCGTTCTTGATGGTTTCCTCCACAGTTTTTCTCCATAATCTTGAAGAGGCCA
AAAGATTAGCTTTATCCAAGGACCAAATAGGCAATGGTGGCTCATGTTGTAGGGCCATGAAAG
CGGCCATTCTTGTGATTCTTTGCACTTCTGGAACGGTGTATTGTTCACTATCCCAAGCGACACC
ATCACCATCGTCTTCCTTTCTCTTACCAAAGTAAATACCTCCCACTAATTCTCTGACAACAACG
AAGTCAGTACCTTTAGCAAATTGTGGCTTGATTGGAGATAAGTCTAAAAGAGAGTCGGATGCA
AAGTTACATGGTCTTAAGTTGGCGTACAATTGAAGTTCTTTACGGATTTTTAGTAAACCTTGTT
CAGGTCTAACACTACCGGTACCCCATTTAGGACCAGCCACAGCACCTAACAAAACGGCATCA
ACCTTCTTGGAGGCTTCCAGCGCCTCATCTGGAAGTGGGACACCTGTAGCATCGATAGCAGCA
CCACCAATTAAATGATTTTCGAAATCGAACTTGACATTGGAACGAACATCAGAAATAGCTTTA
AGAACCTTAATGGCTTCGGCTGTGATTTCTTGACCAACGTGGTCACCTGGCAAAACGACGATC
TTCTTAGGGGCAGACATAGGGGCAGACATTAGAATGGTATATCCTTGAAATATATATATATATTG
CTGAAATGTAAAAGGTAAGAAAAGTTAGAAAGTAAGACGATTGCTAACCACCTATTGGAAAA
AACAATAGGTCCTTAAATAATATTGTCAACTTCAAGTATTGTGATGCAAGCATTTAGTCATGAA
CGCTTCTCTATTCTATATGAAAAGCCGGTTCCGGCCTCTCACCTTTCCTTTTTCTCCCAATTTTT
CAGTTGAAAAAGGTATATGCGTCAGGCGACCTCTGAAATTAACAAAAAATTTCCAGTCATCGA
ATTTGATTCTGTGCGATAGCGCCCCTGTGTGTTCTCGTTATGTTGAGGAAAAAAATAATGGTTG
CTAAGAGATTCGAACTCTTGCATCTTACGATACCTGAGTATTCCCACAGTTAACTGCGGTCAAG
ATATTTCTTGAATCAGGCGCCTTAGACCGCTCGGCCAAACAACCAATTACTTGTTGAGAAATA
GAGTATAATTATCCTATAAATATAACGTTTTTGAACACACATGAACAAGGAAGTACAGGACAAT
TGATTTTGAAGAGAATGTGGATTTTGATGTAATTGTTGGGATTCCATTTTTAATAAGGCAATAAT
ATTAGGTATGTGGATATACTAGAAGTTCTCCTCGACCGTCGATATGCGGTGTGAAATACCGCAC
AGATGCGTAAGGAGAAAATACCGCATCAGGAAATTGTAAACGTTAATATTTTGTTAAAATTCGC
GTTAAATTTTTGTTAAATCAGCTCATTTTTTAACCAATAGGCCGAAATCGGCAAAATCCCTTATA
AATCAAAAGAATAGACCGAGATAGGGTTGAGTGTTGTTCCAGTTTGGAACAAGAGTCCACTAT
TAAAGAACGTGGACTCCAACGTCAAAGGGCGAAAAACCGTCTATCAGGGCGATGGCCCACTA
CGTGAACCATCACCCTAATCAAGTTTTTTGGGGTCGAGGTGCCGTAAAGCACTAAATCGGAAC
CCTAAAGGGAGCCCCCGATTTAGAGCTTGACGGGGAAAGCCGGCGAACGTGGCGAGAAAGG
AAGGGAAGAAAGCGAAAGGAGCGGGCGCTAGGGCGCTGGCAAGTGTAGCGGTCACGCTGC
GCGTAACCACCACACCCGCCGCGCTTAATGCGCCGCTACAGGGCGCGTCGCGCCATTCGCCAT
TCAGGCTGCGCAACTGTTGGGAAGGGCGATCGGTGCGGGCCTCTTCGCTATTACGCCAGCTG
GCGAAAGGGGGATGTGCTGCAAGGCGATTAAGTTGGGTAACGCCAGGGTTTTCCCAGTCACG
ACGTTGTAAAACGACGGCCAGTGAGCGCGCGTAATACGACTCACTATAGGGCGAATTGGGTA
CCGGGCCCCCCCTCGAGGTCGACGGTATCGATAAGCTTGATATCGAATTCCTGCAGCCCGGGG
GATCCGTTAGAATCATTTTGAATAAAAAACACGCTTTTTCAGTTCGAGTTTATCATTATCAATAC
TGCCATTTCAAAGAATACGTAAATAATTAATAGTAGTGATTTTCCTAACTTTATTTAGTCAAAAA
ATTAGCCTTTTAATTCTGCTGTAACCCGTACATGCCCAAAATAGGGGGCGGGTTACACAGAATA
TATAACATCGTAGGTGTCTGGGTGAACAGTTTATTCCTGGCATCCACTAAATATAATGGAGCCC
GCTTTTTAAGCTGGCATCCAGAAAAAAAAAGAATCCCAGCACCAAAATATTGTTTTCTTCACC
AACCATCAGTTCATAGGTCCATTCTCTTAGCGCAACTACAGAGAACAGGGGCACAAACAGGC
AAAAAACGGGCACAACCTCAATGGAGTGATGCAACCTGCCTGGAGTAAATGATGACACAAGG
CAATTGACCCACGCATGTATCTATCTCATTTTCTTACACCTTCTATTACCTTCTGCTCTCTCTGAT
TTGGAAAAAGCTGAAAAAAAAGGTTGAAACCAGTTCCCTGAAATTATTCCCCTACTTGACTA
ATAAGTATATAAAGACGGTAGGTATTGATTGTAATTCTGTAAATCTATTTCTTAAACTTCTTAAAT
TCTACTTTTATAGTTAGTCTTTTTTTTAGTTTTAAAACACCAAGAACTTAGTTTCGAATAAACAC
ACATAAACAAACAAAGAATTC
p425-GFP_-1fs_mCherry.
(SEQ ID NO: 732)
ATGTCTAAAGGTGAAGAATTATTCACTGGTGTTGTCCCAATTTTGGTTGAATTAGATGGTGATG
TTAATGGTCACAAATTTTCTGTCTCCGGTGAAGGTGAAGGTGATGCTACTTACGGTAAATTGA
CCTTAAAATTTATTTGTACTACTGGTAAATTGCCAGTTCCATGGCCAACCTTAGTCACTACTTTC
GGTTATGGTGTTCAATGTTTTGCTAGATACCCAGATCATATGAAACAACATGACTTTTTCAAGT
CTGCCATGCCAGAAGGTTATGTTCAAGAAAGAACTATTTTTTTCAAAGATGACGGTAACTACA
AGACCAGAGCTGAAGTCAAGTTTGAAGGTGATACCTTAGTTAATAGAATCGAATTAAAAGGTA
TTGATTTTAAAGAAGATGGTAACATTTTAGGTCACAAATTGGAATACAACTATAACTCTCACAA
TGTTTACATCATGGCTGACAAACAAAAGAATGGTATCAAAGTTAACTTCAAAATTAGACACAA
CATTGAAGATGGTTCTGTTCAATTAGCTGACCATTATCAACAAAATACTCCAATTGGTGATGGT
CCAGTCTTGTTACCAGACAACCATTACTTATCCACTCAATCTGCCTTATCCAAAGATCCAAACG
AAAAGAGAGACCACATGGTCTTGTTAGAATTTGTTACTGCTGCTGGTATTACCCATGGTATGGA
TGAATTGTACAAAGCTAGCAAACCTGGGTCAATCCTTGGGGCCCAGACTGAGCACGTGATG
GCAGAGCACAGGACGTCATGGTTTCAAAAGGTGAAGAAGATAATATGGCTATTATTAAAGAATTTAT
GAGATTTAAAGTTCATATGGAAGGTTCAGTTAATGGTCATGAATTTGAAATTGAAGGTGAAGGTGAAG
GTAGACCATATGAAGGTACTCAAACTGCTAAATTGAAAGTTACTAAAGGTGGTCCATTACCATTTGCTT
GGGATATTTTGTCACCACAATTTATGTATGGTTCAAAAGCTTATGTTAAACATCCAGCTGATATTCCAG
ATTATTTAAAATTGTCATTTCCAGAAGGTTTTAAATGGGAAAGAGTTATGAATTTTGAAGATGGTGGTG
TTGTTACTGTTACTCAAGATTCATCATTACAAGATGGTGAATTTATTTATAAAGTTAAATTGAGAGGTAC
TAATTTTCCATCAGATGGTCCAGTTATGCAAAAAAAAACTATGGGTTGGGAAGCTTCATCAGAAAGAA
TGTATCCAGAAGATGGTGCTTTAAAAGGTGAAATTAAACAAAGATTGAAATTAAAAGATGGTGGTCAT
TATGATGCTGAAGTTAAAACTACTTATAAAGCTAAAAAACCAGTTCAATTACCAGGTGCTTATAATGTTA
ATATTAAATTGGATATTACTTCACATAATGAAGATTATACTATTGTTGAACAATATGAAAGAGCTGAAGG
TAGACATTCAACTGGTGGTATGGATGAATTATATAAAGGTACCGCTCGAGCAGCTGTGATTGATTGAG
TCGACTTGGTTGAACACGTTGCCAAGGCTTAAGTGAATTTACTTTAAATCTTGCATTTAAATAA
ATTTTCTTTTTATAGCTTTATGACTTAGTTTCAATTTATATACTATTTTAATGACATTTTCGATTCG
GATCCACTAGTTCTAGAGCGGCCGCCACCGCGGTGGAGCTCCAGCTTTTGTTCCCTTTAGTGA
GGGTTAATTGCGCGCTTGGCGTAATCATGGTCATAGCTGTTTCCTGTGTGAAATTGTTATCCGC
TCACAATTCCACACAACATAGGAGCCGGAAGCATAAAGTGTAAAGCCTGGGGTGCCTAATGA
GTGAGGTAACTCACATTAATTGCGTTGCGCTCACTGCCCGCTTTCCAGTCGGGAAACCTGTCG
TGCCAGCTGCATTAATGAATCGGCCAACGCGCGGGGAGAGGCGGTTTGCGTATTGGGCGCTCT
TCCGCTTCCTCGCTCACTGACTCGCTGCGCTCGGTCGTTCGGCTGCGGCGAGCGGTATCAGCT
CACTCAAAGGCGGTAATACGGTTATCCACAGAATCAGGGGATAACGCAGGAAAGAACATGTG
AGCAAAAGGCCAGCAAAAGGCCAGGAACCGTAAAAAGGCCGCGTTGCTGGCGTTTTTCCAT
AGGCTCCGCCCCCCTGACGAGCATCACAAAAATCGACGCTCAAGTCAGAGGTGGCGAAACC
CGACAGGACTATAAAGATACCAGGCGTTTCCCCCTGGAAGCTCCCTCGTGCGCTCTCCTGTTC
CGACCCTGCCGCTTACCGGATACCTGTCCGCCTTTCTCCCTTCGGGAAGCGTGGCGCTTTCTC
ATAGCTCACGCTGTAGGTATCTCAGTTCGGTGTAGGTCGTTCGCTCCAAGCTGGGCTGTGTGC
ACGAACCCCCCGTTCAGCCCGACCGCTGCGCCTTATCCGGTAACTATCGTCTTGAGTCCAACC
CGGTAAGACACGACTTATCGCCACTGGCAGCAGCCACTGGTAACAGGATTAGCAGAGCGAGG
TATGTAGGCGGTGCTACAGAGTTCTTGAAGTGGTGGCCTAACTACGGCTACACTAGAAGGACA
GTATTTGGTATCTGCGCTCTGCTGAAGCCAGTTACCTTCGGAAAAAGAGTTGGTAGCTCTTGA
TCCGGCAAACAAACCACCGCTGGTAGCGGTGGTTTTTTTGTTTGCAAGCAGCAGATTACGCG
CAGAAAAAAAGGATCTCAAGAAGATCCTTTGATCTTTTCTACGGGGTCTGACGCTCAGTGGA
ACGAAAACTCACGTTAAGGGATTTTGGTCATGAGATTATCAAAAAGGATCTTCACCTAGATCC
TTTTAAATTAAAAATGAAGTTTTAAATCAATCTAAAGTATATATGAGTAAACTTGGTCTGACAG
TTACCAATGCTTAATCAGTGAGGCACCTATCTCAGCGATCTGTCTATTTCGTTCATCCATAGTTG
CCTGACTCCCCGTCGTGTAGATAACTACGATACGGGAGGGCTTACCATCTGGCCCCAGTGCTG
CAATGATACCGCGAGACCCACGCTCACCGGCTCCAGATTTATCAGCAATAAACCAGCCAGCCG
GAAGGGCCGAGCGCAGAAGTGGTCCTGCAACTTTATCCGCCTCCATCCAGTCTATTAATTGTT
GCCGGGAAGCTAGAGTAAGTAGTTCGCCAGTTAATAGTTTGCGCAACGTTGTTGCCATTGCTA
CAGGCATCGTGGTGTCACGCTCGTCGTTTGGTATGGCTTCATTCAGCTCCGGTTCCCAACGATC
AAGGCGAGTTACATGATCCCCCATGTTGTGCAAAAAAGCGGTTAGCTCCTTCGGTCCTCCGAT
CGTTGTCAGAAGTAAGTTGGCCGCAGTGTTATCACTCATGGTTATGGCAGCACTGCATAATTCT
CTTACTGTCATGCCATCCGTAAGATGCTTTTCTGTGACTGGTGAGTACTCAACCAAGTCATTCT
GAGAATAGTGTATGCGGCGACCGAGTTGCTCTTGCCCGGCGTCAATACGGGATAATACCGCGC
CACATAGCAGAACTTTAAAAGTGCTCATCATTGGAAAACGTTCTTCGGGGCGAAAACTCTCA
AGGATCTTACCGCTGTTGAGATCCAGTTCGATGTAACCCACTCGTGCACCCAACTGATCTTCA
GCATCTTTTACTTTCACCAGCGTTTCTGGGTGAGCAAAAACAGGAAGGCAAAATGCCGCAAA
AAAGGGAATAAGGGCGACACGGAAATGTTGAATACTCATACTCTTCCTTTTTCAATATTATTGA
AGCATTTATCAGGGTTATTGTCTCATGAGCGGATACATATTTGAATGTATTTAGAAAAATAAACA
AATAGGGGTTCCGCGCACATTTCCCCGAAAAGTGCCACCTGAACGAAGCATCTGTGCTTCATT
TTGTAGAACAAAAATGCAACGCGAGAGCGCTAATTTTTCAAACAAAGAATCTGAGCTGCATTT
TTACAGAACAGAAATGCAACGCGAAAGCGCTATTTTACCAACGAAGAATCTGTGCTTCATTTT
TGTAAAACAAAAATGCAACGCGAGAGCGCTAATTTTTCAAACAAAGAATCTGAGCTGCATTTT
TACAGAACAGAAATGCAACGCGAGAGCGCTATTTTACCAACAAAGAATCTATACTTCTTTTTT
GTTCTACAAAAATGCATCCCGAGAGCGCTATTTTTCTAACAAAGCATCTTAGATTACTTTTTTTC
TCCTTTGTGCGCTCTATAATGCAGTCTCTTGATAACTTTTTGCACTGTAGGTCCGTTAAGGTTAG
AAGAAGGCTACTTTGGTGTCTATTTTCTCTTCCATAAAAAAAGCCTGACTCCACTTCCCGCGTT
TACTGATTACTAGCGAAGCTGCGGGTGCATTTTTTCAAGATAAAGGCATCCCCGATTATATTCT
ATACCGATGTGGATTGCGCATACTTTGTGAACAGAAAGTGATAGCGTTGATGATTCTTCATTGG
TCAGAAAATTATGAACGGTTTCTTCTATTTTGTCTCTATATACTACGTATAGGAAATGTTTACATT
TTCGTATTGTTTTCGATTCACTCTATGAATAGTTCTTACTACAATTTTTTTGTCTAAAGAGTAATA
CTAGAGATAAACATAAAAAATGTAGAGGTCGAGTTTAGATGCAAGTTCAAGGAGCGAAAGGT
GGATGGGTAGGTTATATAGGGATATAGCACAGAGATATATAGCAAAGAGATACTTTTGAGCAAT
GTTTGTGGAAGCGGTATTCGCAATATTTTAGTAGCTCGTTACAGTCCGGTGCGTTTTTGGTTTT
TTGAAAGTGCGTCTTCAGAGCGCTTTTGGTTTTCAAAAGCGCTCTGAAGTTCCTATACTTTCTA
GAGAATAGGAACTTCGGAATAGGAACTTCAAAGCGTTTCCGAAAACGAGCGCTTCCGAAAAT
GCAACGCGAGCTGCGCACATACAGCTCACTGTTCACGTCGCACCTATATCTGCGTGTTGCCTG
TATATATATATACATGAGAAGAACGGCATAGTGCGTGTTTATGCTTAAATGCGTACTTATATGCGT
CTATTTATGTAGGATGAAAGGTAGTCTAGTACCTCCTGTGATATTATCCCATTCCATGCGGGGTA
TCGTATGCTTCCTTCAGCACTACCCTTTAGCTGTTCTATATGCTGCCACTCCTCAATTGGATTAG
TCTCATCCTTCAATGCTATCATTTCCTTTGATATTGGATCATACTAAGAAACCATTATTATCATGA
CATTAACCTATAAAAATAGGCGTATCACGAGGCCCTTTCGTCTCGCGCGTTTCGGTGATGACGG
TGAAAACCTCTGACACATGCAGCTCCCGGAGACGGTCACAGCTTGTCTGTAAGCGGATGCCG
GGAGCAGACAAGCCCGTCAGGGCGCGTCAGCGGGTGTTGGCGGGTGTCGGGGCTGGCTTAA
CTATGCGGCATCAGAGCAGATTGTACTGAGAGTGCACCATATCGACTACGTCGTAAGGCCGTT
TCTGACAGAGTAAAATTCTTGAGGGAACTTTCACCATTATGGGAAATGCTTCAAGAAGGTATT
GACTTAAACTCCATCAAATGGTCAGGTCATTGAGTGTTTTTTATTTGTTGTATTTTTTTTTTTTTA
GAGAAAATCCTCCAATATCAAATTAGGAATCGTAGTTTCATGATTTTCTGTTACACCTAACTTTT
TGTGTGGTGCCCTCCTCCTTGTCAATATTAATGTTAAAGTGCAATTCTTTTTCCTTATCACGTTG
AGCCATTAGTATCAATTTGCTTACCTGTATTCCTTTACTATCCTCCTTTTTCTCCTTCTTGATAAA
TGTATGTAGATTGCGTATATAGTTTCGTCTACCCTATGAACATATTCCATTTTGTAATTTCGTGTC
GTTTCTATTATGAATTTCATTTATAAAGTTTATGTACAAATATCATAAAAAAAGAGAATCTTTTTA
AGCAAGGATTTTCTTAACTTCTTCGGCGACAGCATCACCGACTTCGGTGGTACTGTTGGAACC
ACCTAAATCACCAGTTCTGATACCTGCATCCAAAACCTTTTTAACTGCATCTTCAATGGCCTTA
CCTTCTTCAGGCAAGTTCAATGACAATTTCAACATCATTGCAGCAGACAAGATAGTGGCGATA
GGGTCAACCTTATTCTTTGGCAAATCTGGAGCAGAACCGTGGCATGGTTCGTACAAACCAAAT
GCGGTGTTCTTGTCTGGCAAAGAGGCCAAGGACGCAGATGGCAACAAACCCAAGGAACCTG
GGATAACGGAGGCTTCATCGGAGATGATATCACCAAACATGTTGCTGGTGATTATAATACCATT
TAGGTGGGTTGGGTTCTTAACTAGGATCATGGCGGCAGAATCAATCAATTGATGTTGAACCTTC
AATGTAGGGAATTCGTTCTTGATGGTTTCCTCCACAGTTTTTCTCCATAATCTTGAAGAGGCCA
AAAGATTAGCTTTATCCAAGGACCAAATAGGCAATGGTGGCTCATGTTGTAGGGCCATGAAAG
CGGCCATTCTTGTGATTCTTTGCACTTCTGGAACGGTGTATTGTTCACTATCCCAAGCGACACC
ATCACCATCGTCTTCCTTTCTCTTACCAAAGTAAATACCTCCCACTAATTCTCTGACAACAACG
AAGTCAGTACCTTTAGCAAATTGTGGCTTGATTGGAGATAAGTCTAAAAGAGAGTCGGATGCA
AAGTTACATGGTCTTAAGTTGGCGTACAATTGAAGTTCTTTACGGATTTTTAGTAAACCTTGTT
CAGGTCTAACACTACCGGTACCCCATTTAGGACCAGCCACAGCACCTAACAAAACGGCATCA
ACCTTCTTGGAGGCTTCCAGCGCCTCATCTGGAAGTGGGACACCTGTAGCATCGATAGCAGCA
CCACCAATTAAATGATTTTCGAAATCGAACTTGACATTGGAACGAACATCAGAAATAGCTTTA
AGAACCTTAATGGCTTCGGCTGTGATTTCTTGACCAACGTGGTCACCTGGCAAAACGACGATC
TTCTTAGGGGCAGACATAGGGGCAGACATTAGAATGGTATATCCTTGAAATATATATATATATTG
CTGAAATGTAAAAGGTAAGAAAAGTTAGAAAGTAAGACGATTGCTAACCACCTATTGGAAAA
AACAATAGGTCCTTAAATAATATTGTCAACTTCAAGTATTGTGATGCAAGCATTTAGTCATGAA
CGCTTCTCTATTCTATATGAAAAGCCGGTTCCGGCCTCTCACCTTTCCTTTTTCTCCCAATTTTT
CAGTTGAAAAAGGTATATGCGTCAGGCGACCTCTGAAATTAACAAAAAATTTCCAGTCATCGA
ATTTGATTCTGTGCGATAGCGCCCCTGTGTGTTCTCGTTATGTTGAGGAAAAAAATAATGGTTG
CTAAGAGATTCGAACTCTTGCATCTTACGATACCTGAGTATTCCCACAGTTAACTGCGGTCAAG
ATATTTCTTGAATCAGGCGCCTTAGACCGCTCGGCCAAACAACCAATTACTTGTTGAGAAATA
GAGTATAATTATCCTATAAATATAACGTTTTTGAACACACATGAACAAGGAAGTACAGGACAAT
TGATTTTGAAGAGAATGTGGATTTTGATGTAATTGTTGGGATTCCATTTTTAATAAGGCAATAAT
ATTAGGTATGTGGATATACTAGAAGTTCTCCTCGACCGTCGATATGCGGTGTGAAATACCGCAC
AGATGCGTAAGGAGAAAATACCGCATCAGGAAATTGTAAACGTTAATATTTTGTTAAAATTCGC
GTTAAATTTTTGTTAAATCAGCTCATTTTTTAACCAATAGGCCGAAATCGGCAAAATCCCTTATA
AATCAAAAGAATAGACCGAGATAGGGTTGAGTGTTGTTCCAGTTTGGAACAAGAGTCCACTAT
TAAAGAACGTGGACTCCAACGTCAAAGGGCGAAAAACCGTCTATCAGGGCGATGGCCCACTA
CGTGAACCATCACCCTAATCAAGTTTTTTGGGGTCGAGGTGCCGTAAAGCACTAAATCGGAAC
CCTAAAGGGAGCCCCCGATTTAGAGCTTGACGGGGAAAGCCGGCGAACGTGGCGAGAAAGG
AAGGGAAGAAAGCGAAAGGAGCGGGCGCTAGGGCGCTGGCAAGTGTAGCGGTCACGCTGC
GCGTAACCACCACACCCGCCGCGCTTAATGCGCCGCTACAGGGCGCGTCGCGCCATTCGCCAT
TCAGGCTGCGCAACTGTTGGGAAGGGCGATCGGTGCGGGCCTCTTCGCTATTACGCCAGCTG
GCGAAAGGGGGATGTGCTGCAAGGCGATTAAGTTGGGTAACGCCAGGGTTTTCCCAGTCACG
ACGTTGTAAAACGACGGCCAGTGAGCGCGCGTAATACGACTCACTATAGGGCGAATTGGGTA
CCGGGCCCCCCCTCGAGGTCGACGGTATCGATAAGCTTGATATCGAATTCCTGCAGCCCGGGG
GATCCGTTAGAATCATTTTGAATAAAAAACACGCTTTTTCAGTTCGAGTTTATCATTATCAATAC
TGCCATTTCAAAGAATACGTAAATAATTAATAGTAGTGATTTTCCTAACTTTATTTAGTCAAAAA
ATTAGCCTTTTAATTCTGCTGTAACCCGTACATGCCCAAAATAGGGGGCGGGTTACACAGAATA
TATAACATCGTAGGTGTCTGGGTGAACAGTTTATTCCTGGCATCCACTAAATATAATGGAGCCC
GCTTTTTAAGCTGGCATCCAGAAAAAAAAAGAATCCCAGCACCAAAATATTGTTTTCTTCACC
AACCATCAGTTCATAGGTCCATTCTCTTAGCGCAACTACAGAGAACAGGGGCACAAACAGGC
AAAAAACGGGCACAACCTCAATGGAGTGATGCAACCTGCCTGGAGTAAATGATGACACAAGG
CAATTGACCCACGCATGTATCTATCTCATTTTCTTACACCTTCTATTACCTTCTGCTCTCTCTGAT
TTGGAAAAAGCTGAAAAAAAAGGTTGAAACCAGTTCCCTGAAATTATTCCCCTACTTGACTA
ATAAGTATATAAAGACGGTAGGTATTGATTGTAATTCTGTAAATCTATTTCTTAAACTTCTTAAAT
TCTACTTTTATAGTTAGTCTTTTTTTTAGTTTTAAAACACCAAGAACTTAGTTTCGAATAAACAC
ACATAAACAAACAAAGAATTC

KEY:
GFP open reading frame
Linker containing stop codon +1 frameshift, or -1 frameshift
mCherry open reading frame
Plasmid backbone (containing the GPD promoter, Leu2 marker, and AmpR)
Protospacer (underlined)
PAM (boldfaced)

[1663] DNA Sequences of Mammalian Prime Editor Plasmids and Example PEgRNA Plasmid

pCMV-PE1:
(SEQ ID NO: 733)
ATGAAACGGACAGCCGACGGAAGCGAGTTCGAGTCACCAAAGAAGAAGCGGAAAGTCGAC
AAGAAGTACAGCATCGGCCTGGACATCGGCACCAACTCTGTGGGCTGGGCCGTGATCACCGA
CGAGTACAAGGTGCCCAGCAAGAAATTCAAGGTGCTGGGCAACACCGACCGGCACAGCATC
AAGAAGAACCTGATCGGAGCCCTGCTGTTCGACAGCGGCGAAACAGCCGAGGCCACCCGGC
TGAAGAGAACCGCCAGAAGAAGATACACCAGACGGAAGAACCGGATCTGCTATCTGCAAGA
GATCTTCAGCAACGAGATGGCCAAGGTGGACGACAGCTTCTTCCACAGACTGGAAGAGTCCT
TCCTGGTGGAAGAGGATAAGAAGCACGAGCGGCACCCCATCTTCGGCAACATCGTGGACGAG
GTGGCCTACCACGAGAAGTACCCCACCATCTACCACCTGAGAAAGAAACTGGTGGACAGCAC
CGACAAGGCCGACCTGCGGCTGATCTATCTGGCCCTGGCCCACATGATCAAGTTCCGGGGCCA
CTTCCTGATCGAGGGCGACCTGAACCCCGACAACAGCGACGTGGACAAGCTGTTCATCCAGC
TGGTGCAGACCTACAACCAGCTGTTCGAGGAAAACCCCATCAACGCCAGCGGCGTGGACGCC
AAGGCCATCCTGTCTGCCAGACTGAGCAAGAGCAGACGGCTGGAAAATCTGATCGCCCAGCT
GCCCGGCGAGAAGAAGAATGGCCTGTTCGGAAACCTGATTGCCCTGAGCCTGGGCCTGACCC
CCAACTTCAAGAGCAACTTCGACCTGGCCGAGGATGCCAAACTGCAGCTGAGCAAGGACAC
CTACGACGACGACCTGGACAACCTGCTGGCCCAGATCGGCGACCAGTACGCCGACCTGTTTC
TGGCCGCCAAGAACCTGTCCGACGCCATCCTGCTGAGCGACATCCTGAGAGTGAACACCGAG
ATCACCAAGGCCCCCCTGAGCGCCTCTATGATCAAGAGATACGACGAGCACCACCAGGACCT
GACCCTGCTGAAAGCTCTCGTGCGGCAGCAGCTGCCTGAGAAGTACAAAGAGATTTTCTTCG
ACCAGAGCAAGAACGGCTACGCCGGCTACATTGACGGCGGAGCCAGCCAGGAAGAGTTCTA
CAAGTTCATCAAGCCCATCCTGGAAAAGATGGACGGCACCGAGGAACTGCTCGTGAAGCTGA
ACAGAGAGGACCTGCTGCGGAAGCAGCGGACCTTCGACAACGGCAGCATCCCCCACCAGAT
CCACCTGGGAGAGCTGCACGCCATTCTGCGGCGGCAGGAAGATTTTTACCCATTCCTGAAGG
ACAACCGGGAAAAGATCGAGAAGATCCTGACCTTCCGCATCCCCTACTACGTGGGCCCTCTG
GCCAGGGGAAACAGCAGATTCGCCTGGATGACCAGAAAGAGCGAGGAAACCATCACCCCCT
GGAACTTCGAGGAAGTGGTGGACAAGGGCGCTTCCGCCCAGAGCTTCATCGAGCGGATGAC
CAACTTCGATAAGAACCTGCCCAACGAGAAGGTGCTGCCCAAGCACAGCCTGCTGTACGAGT
ACTTCACCGTGTATAACGAGCTGACCAAAGTGAAATACGTGACCGAGGGAATGAGAAAGCCC
GCCTTCCTGAGCGGCGAGCAGAAAAAGGCCATCGTGGACCTGCTGTTCAAGACCAACCGGA
AAGTGACCGTGAAGCAGCTGAAAGAGGACTACTTCAAGAAAATCGAGTGCTTCGACTCCGTG
GAAATCTCCGGCGTGGAAGATCGGTTCAACGCCTCCCTGGGCACATACCACGATCTGCTGAA
AATTATCAAGGACAAGGACTTCCTGGACAATGAGGAAAACGAGGACATTCTGGAAGATATCG
TGCTGACCCTGACACTGTTTGAGGACAGAGAGATGATCGAGGAACGGCTGAAAACCTATGCC
CACCTGTTCGACGACAAAGTGATGAAGCAGCTGAAGCGGCGGAGATACACCGGCTGGGGCA
GGCTGAGCCGGAAGCTGATCAACGGCATCCGGGACAAGCAGTCCGGCAAGACAATCCTGGAT
TTCCTGAAGTCCGACGGCTTCGCCAACAGAAACTTCATGCAGCTGATCCACGACGACAGCCT
GACCTTTAAAGAGGACATCCAGAAAGCCCAGGTGTCCGGCCAGGGCGATAGCCTGCACGAGC
ACATTGCCAATCTGGCCGGCAGCCCCGCCATTAAGAAGGGCATCCTGCAGACAGTGAAGGTG
GTGGACGAGCTCGTGAAAGTGATGGGCCGGCACAAGCCCGAGAACATCGTGATCGAAATGG
CCAGAGAGAACCAGACCACCCAGAAGGGACAGAAGAACAGCCGCGAGAGAATGAAGCGGA
TCGAAGAGGGCATCAAAGAGCTGGGCAGCCAGATCCTGAAAGAACACCCCGTGGAAAACAC
CCAGCTGCAGAACGAGAAGCTGTACCTGTACTACCTGCAGAATGGGCGGGATATGTACGTGG
ACCAGGAACTGGACATCAACCGGCTGTCCGACTACGATGTGGACGCTATCGTGCCTCAGAGC
TTTCTGAAGGACGACTCCATCGACAACAAGGTGCTGACCAGAAGCGACAAGAACCGGGGCA
AGAGCGACAACGTGCCCTCCGAAGAGGTCGTGAAGAAGATGAAGAACTACTGGCGGCAGCT
GCTGAACGCCAAGCTGATTACCCAGAGAAAGTTCGACAATCTGACCAAGGCCGAGAGAGGC
GGCCTGAGCGAACTGGATAAGGCCGGCTTCATCAAGAGACAGCTGGTGGAAACCCGGCAGAT
CACAAAGCACGTGGCACAGATCCTGGACTCCCGGATGAACACTAAGTACGACGAGAATGACA
AGCTGATCCGGGAAGTGAAAGTGATCACCCTGAAGTCCAAGCTGGTGTCCGATTTCCGGAAG
GATTTCCAGTTTTACAAAGTGCGCGAGATCAACAACTACCACCACGCCCACGACGCCTACCTG
AACGCCGTCGTGGGAACCGCCCTGATCAAAAAGTACCCTAAGCTGGAAAGCGAGTTCGTGTA
CGGCGACTACAAGGTGTACGACGTGCGGAAGATGATCGCCAAGAGCGAGCAGGAAATCGGC
AAGGCTACCGCCAAGTACTTCTTCTACAGCAACATCATGAACTTTTTCAAGACCGAGATTACC
CTGGCCAACGGCGAGATCCGGAAGCGGCCTCTGATCGAGACAAACGGCGAAACCGGGGAGA
TCGTGTGGGATAAGGGCCGGGATTTTGCCACCGTGCGGAAAGTGCTGAGCATGCCCCAAGTG
AATATCGTGAAAAAGACCGAGGTGCAGACAGGCGGCTTCAGCAAAGAGTCTATCCTGCCCAA
GAGGAACAGCGATAAGCTGATCGCCAGAAAGAAGGACTGGGACCCTAAGAAGTACGGCGGC
TTCGACAGCCCCACCGTGGCCTATTCTGTGCTGGTGGTGGCCAAAGTGGAAAAGGGCAAGTC
CAAGAAACTGAAGAGTGTGAAAGAGCTGCTGGGGATCACCATCATGGAAAGAAGCAGCTTC
GAGAAGAATCCCATCGACTTTCTGGAAGCCAAGGGCTACAAAGAAGTGAAAAAGGACCTGA
TCATCAAGCTGCCTAAGTACTCCCTGTTCGAGCTGGAAAACGGCCGGAAGAGAATGCTGGCC
TCTGCCGGCGAACTGCAGAAGGGAAACGAACTGGCCCTGCCCTCCAAATATGTGAACTTCCT
GTACCTGGCCAGCCACTATGAGAAGCTGAAGGGCTCCCCCGAGGATAATGAGCAGAAACAGC
TGTTTGTGGAACAGCACAAGCACTACCTGGACGAGATCATCGAGCAGATCAGCGAGTTCTCC
AAGAGAGTGATCCTGGCCGACGCTAATCTGGACAAAGTGCTGTCCGCCTACAACAAGCACCG
GGATAAGCCCATCAGAGAGCAGGCCGAGAATATCATCCACCTGTTTACCCTGACCAATCTGGG
AGCCCCTGCCGCCTTCAAGTACTTTGACACCACCATCGACCGGAAGAGGTACACCAGCACCA
AAGAGGTGCTGGACGCCACCCTGATCCACCAGAGCATCACCGGCCTGTACGAGACACGGATC
GACCTGTCTCAGCTGGGAGGTGACTCTGGAGGATCTAGCGGAGGATCCTCTGGCAGCGAGACAC
CAGGAACAAGCGAGTCAGCAACACCAGAGAGCAGTGGCGGCAGCAGCGGCGGCAGCAGCACCC
TAAATATAGAAGATGAGTATCGGCTACATGAGACCTCAAAAGAGCCAGATGTTTCTCTAG
GGTCCACATGGCTGTCTGATTTTCCTCAGGCCTGGGCGGAAACCGGGGGCATGGGACT
GGCAGTTCGCCAAGCTCCTCTGATCATACCTCTGAAAGCAACCTCTACCCCCGTGTCCA
TAAAACAATACCCCATGTCACAAGAAGCCAGACTGGGGATCAAGCCCCACATACAGAGA
CTGTTGGACCAGGGAATACTGGTACCCTGCCAGTCCCCCTGGAACACGCCCCTGCTACC
CGTTAAGAAACCAGGGACTAATGATTATAGGCCTGTCCAGGATCTGAGAGAAGTCAACA
AGCGGGTGGAAGACATCCACCCCACCGTGCCCAACCCTTACAACCTCTTGAGCGGGCT
CCCACCGTCCCACCAGTGGTACACTGTGCTTGATTTAAAGGATGCCTTTTTCTGCCTGA
GACTCCACCCCACCAGTCAGCCTCTCTTCGCCTTTGAGTGGAGAGATCCAGAGATGGG
AATCTCAGGACAATTGACCTGGACCAGACTCCCACAGGGTTTCAAAAACAGTCCCACCC
TGTTTGATGAGGCACTGCACAGAGACCTAGCAGACTTCCGGATCCAGCACCCAGACTT
GATCCTGCTACAGTACGTGGATGACTTACTGCTGGCCGCCACTTCTGAGCTAGACTGCC
AACAAGGTACTCGGGCCCTGTTACAAACCCTAGGGAACCTCGGGTATCGGGCCTCGGC
CAAGAAAGCCCAAATTTGCCAGAAACAGGTCAAGTATCTGGGGTATCTTCTAAAAGAGG
GTCAGAGATGGCTGACTGAGGCCAGAAAAGAGACTGTGATGGGGCAGCCTACTCCGAA
GACCCCTCGACAACTAAGGGAGTTCCTAGGGACGGCAGGCTTCTGTCGCCTCTGGATC
CCTGGGTTTGCAGAAATGGCAGCCCCCCTGTACCCTCTCACCAAAACGGGGACTCTGTT
TAATTGGGGCCCAGACCAACAAAAGGCCTATCAAGAAATCAAGCAAGCTCTTCTAACTG
CCCCAGCCCTGGGGTTGCCAGATTTGACTAAGCCCTTTGAACTCTTTGTCGACGAGAAG
CAGGGCTACGCCAAAGGTGTCCTAACGCAAAAACTGGGACCTTGGCGTCGGCCGGTGG
CCTACCTGTCCAAAAAGCTAGACCCAGTAGCAGCTGGGTGGCCCCCTTGCCTACGGATG
GTAGCAGCCATTGCCGTACTGACAAAGGATGCAGGCAAGCTAACCATGGGACAGCCAC
TAGTCATTCTGGCCCCCCATGCAGTAGAGGCACTAGTCAAACAACCCCCCGACCGCTGG
CTTTCCAACGCCCGGATGACTCACTATCAGGCCTTGCTTTTGGACACGGACCGGGTCCA
GTTCGGACCGGTGGTAGCCCTGAACCCGGCTACGCTGCTCCCACTGCCTGAGGAAGGG
CTGCAACACAACTGCCTTGATATCCTGGCCGAAGCCCACGGAACCCGACCCGACCTAAC
GGACCAGCCGCTCCCAGACGCCGACCACACCTGGTACACGGATGGAAGCAGTCTCTTA
CAAGAGGGACAGCGTAAGGCGGGAGCTGCGGTGACCACCGAGACCGAGGTAATCTGG
GCTAAAGCCCTGCCAGCCGGGACATCCGCTCAGCGGGCTGAACTGATAGCACTCACCC
AGGCCCTAAAGATGGCAGAAGGTAAGAAGCTAAATGTTTATACTGATAGCCGTTATGCTT
TTGCTACTGCCCATATCCATGGAGAAATATACAGAAGGCGTGGGTTGCTCACATCAGAA
GGCAAAGAGATCAAAAATAAAGACGAGATCTTGGCCCTACTAAAAGCCCTCTTTCTGCC
CAAAAGACTTAGCATAATCCATTGTCCAGGACATCAAAAGGGACACAGCGCCGAGGCTA
GAGGCAACCGGATGGCTGACCAAGCGGCCCGAAAGGCAGCCATCACAGAGACTCCAGA
CACCTCTACCCTCCTCATAGAAAATTCATCACCCTCTGGCGGCTCAAAAAGAACCGCCG
ACGGCAGCGAATTCGAGCCCAAGAAGAAGAGGAAAGTCTAACCGGTCATCATCACCATCA
CCATTGAGTTTAAACCCGCTGATCAGCCTCGACTGTGCCTTCTAGTTGCCAGCCATCTGTTGTT
TGCCCCTCCCCCGTGCCTTCCTTGACCCTGGAAGGTGCCACTCCCACTGTCCTTTCCTAATAA
AATGAGAAAATTGCATCGCATTGTCTGAGTAGGTGTCATTCTATTCTGGGGGGTGGGGTGGGG
CAGGACAGCAAGGGGGAGGATTGGGAAGACAATAGCAGGCATGCTGGGGATGCGGTGGGCT
CTATGGCTTCTGAGGCGGAAAGAACCAGCTGGGGCTCGATACCGTCGACCTCTAGCTAGAGC
TTGGCGTAATCATGGTCATAGCTGTTTCCTGTGTGAAATTGTTATCCGCTCACAATTCCACACA
ACATACGAGCCGGAAGCATAAAGTGTAAAGCCTAGGGTGCCTAATGAGTGAGCTAACTCACAT
TAATTGCGTTGCGCTCACTGCCCGCTTTCCAGTCGGGAAACCTGTCGTGCCAGCTGCATTAAT
GAATCGGCCAACGCGCGGGGAGAGGCGGTTTGCGTATTGGGCGCTCTTCCGCTTCCTCGCTC
ACTGACTCGCTGCGCTCGGTCGTTCGGCTGCGGCGAGCGGTATCAGCTCACTCAAAGGCGGT
AATACGGTTATCCACAGAATCAGGGGATAACGCAGGAAAGAACATGTGAGCAAAAGGCCAGC
AAAAGGCCAGGAACCGTAAAAAGGCCGCGTTGCTGGCGTTTTTCCATAGGCTCCGCCCCCCT
GACGAGCATCACAAAAATCGACGCTCAAGTCAGAGGTGGCGAAACCCGACAGGACTATAAA
GATACCAGGCGTTTCCCCCTGGAAGCTCCCTCGTGCGCTCTCCTGTTCCGACCCTGCCGCTTA
CCGGATACCTGTCCGCCTTTCTCCCTTCGGGAAGCGTGGCGCTTTCTCATAGCTCACGCTGTAG
GTATCTCAGTTCGGTGTAGGTCGTTCGCTCCAAGCTGGGCTGTGTGCACGAACCCCCCGTTCA
GCCCGACCGCTGCGCCTTATCCGGTAACTATCGTCTTGAGTCCAACCCGGTAAGACACGACTT
ATCGCCACTGGCAGCAGCCACTGGTAACAGGATTAGCAGAGCGAGGTATGTAGGCGGTGCTA
CAGAGTTCTTGAAGTGGTGGCCTAACTACGGCTACACTAGAAGAACAGTATTTGGTATCTGCG
CTCTGCTGAAGCCAGTTACCTTCGGAAAAAGAGTTGGTAGCTCTTGATCCGGCAAACAAACC
ACCGCTGGTAGCGGTGGTTTTTTTGTTTGCAAGCAGCAGATTACGCGCAGAAAAAAAGGATC
TCAAGAAGATCCTTTGATCTTTTCTACGGGGTCTGACGCTCAGTGGAACGAAAACTCACGTTA
AGGGATTTTGGTCATGAGATTATCAAAAAGGATCTTCACCTAGATCCTTTTAAATTAAAAATGA
AGTTTTAAATCAATCTAAAGTATATATGAGTAAACTTGGTCTGACAGTTACCAATGCTTAATCA
GTGAGGCACCTATCTCAGCGATCTGTCTATTTCGTTCATCCATAGTTGCCTGACTCCCCGTCGT
GTAGATAACTACGATACGGGAGGGCTTACCATCTGGCCCCAGTGCTGCAATGATACCGCGAGA
CCCACGCTCACCGGCTCCAGATTTATCAGCAATAAACCAGCCAGCCGGAAGGGCCGAGCGCA
GAAGTGGTCCTGCAACTTTATCCGCCTCCATCCAGTCTATTAATTGTTGCCGGGAAGCTAGAGT
AAGTAGTTCGCCAGTTAATAGTTTGCGCAACGTTGTTGCCATTGCTACAGGCATCGTGGTGTC
ACGCTCGTCGTTTGGTATGGCTTCATTCAGCTCCGGTTCCCAACGATCAAGGCGAGTTACATG
ATCCCCCATGTTGTGCAAAAAAGCGGTTAGCTCCTTCGGTCCTCCGATCGTTGTCAGAAGTAA
GTTGGCCGCAGTGTTATCACTCATGGTTATGGCAGCACTGCATAATTCTCTTACTGTCATGCCAT
CCGTAAGATGCTTTTCTGTGACTGGTGAGTACTCAACCAAGTCATTCTGAGAATAGTGTATGC
GGCGACCGAGTTGCTCTTGCCCGGCGTCAATACGGGATAATACCGCGCCACATAGCAGAACTT
TAAAAGTGCTCATCATTGGAAAACGTTCTTCGGGGCGAAAACTCTCAAGGATCTTACCGCTGT
TGAGATCCAGTTCGATGTAACCCACTCGTGCACCCAACTGATCTTCAGCATCTTTTACTTTCAC
CAGCGTTTCTGGGTGAGCAAAAACAGGAAGGCAAAATGCCGCAAAAAAGGGAATAAGGGCG
ACACGGAAATGTTGAATACTCATACTCTTCCTTTTTCAATATTATTGAAGCATTTATCAGGGTTA
TTGTCTCATGAGCGGATACATATTTGAATGTATTTAGAAAAATAAACAAATAGGGGTTCCGCGC
ACATTTCCCCGAAAAGTGCCACCTGACGTCGACGGATCGGGAGATCGATCTCCCGATCCCCTA
GGGTCGACTCTCAGTACAATCTGCTCTGATGCCGCATAGTTAAGCCAGTATCTGCTCCCTGCTT
GTGTGTTGGAGGTCGCTGAGTAGTGCGCGAGCAAAATTTAAGCTACAACAAGGCAAGGCTTG
ACCGACAATTGCATGAAGAATCTGCTTAGGGTTAGGCGTTTTGCGCTGCTTCGCGATGTACGG
GCCAGATATACGCGTTGACATTGATTATTGACTAGTTATTAATAGTAATCAATTACGGGGTCATT
AGTTCATAGCCCATATATGGAGTTCCGCGTTACATAACTTACGGTAAATGGCCCGCCTGGCTGA
CCGCCCAACGACCCCCGCCCATTGACGTCAATAATGACGTATGTTCCCATAGTAACGCCAATA
GGGACTTTCCATTGACGTCAATGGGTGGAGTATTTACGGTAAACTGCCCACTTGGCAGTACAT
CAAGTGTATCATATGCCAAGTACGCCCCCTATTGACGTCAATGACGGTAAATGGCCCGCCTGG
CATTATGCCCAGTACATGACCTTATGGGACTTTCCTACTTGGCAGTACATCTACGTATTAGTCAT
CGCTATTACCATGGTGATGCGGTTTTGGCAGTACATCAATGGGCGTGGATAGCGGTTTGACTCA
CGGGGATTTCCAAGTCTCCACCCCATTGACGTCAATGGGAGTTTGTTTTGGCACCAAAATCAA
CGGGACTTTCCAAAATGTCGTAACAACTCCGCCCCATTGACGCAAATGGGCGGTAGGCGTGTA
CGGTGGGAGGTCTATATAAGCAGAGCTGGTTTAGTGAACCGTCAGATCCGCTAGAGATCCGCG
GCCGCTAATACGACTCACTATAGGGAGAGCCGCCACC
pCMV-PE2:
(SEQ ID NO: 734)
ATGAAACGGACAGCCGACGGAAGCGAGTTCGAGTCACCAAAGAAGAAGCGGAAAGTCGAC
AAGAAGTACAGCATCGGCCTGGACATCGGCACCAACTCTGTGGGCTGGGCCGTGATCACCGA
CGAGTACAAGGTGCCCAGCAAGAAATTCAAGGTGCTGGGCAACACCGACCGGCACAGCATC
AAGAAGAACCTGATCGGAGCCCTGCTGTTCGACAGCGGCGAAACAGCCGAGGCCACCCGGC
TGAAGAGAACCGCCAGAAGAAGATACACCAGACGGAAGAACCGGATCTGCTATCTGCAAGA
GATCTTCAGCAACGAGATGGCCAAGGTGGACGACAGCTTCTTCCACAGACTGGAAGAGTCCT
TCCTGGTGGAAGAGGATAAGAAGCACGAGCGGCACCCCATCTTCGGCAACATCGTGGACGAG
GTGGCCTACCACGAGAAGTACCCCACCATCTACCACCTGAGAAAGAAACTGGTGGACAGCAC
CGACAAGGCCGACCTGCGGCTGATCTATCTGGCCCTGGCCCACATGATCAAGTTCCGGGGCCA
CTTCCTGATCGAGGGCGACCTGAACCCCGACAACAGCGACGTGGACAAGCTGTTCATCCAGC
TGGTGCAGACCTACAACCAGCTGTTCGAGGAAAACCCCATCAACGCCAGCGGCGTGGACGCC
AAGGCCATCCTGTCTGCCAGACTGAGCAAGAGCAGACGGCTGGAAAATCTGATCGCCCAGCT
GCCCGGCGAGAAGAAGAATGGCCTGTTCGGAAACCTGATTGCCCTGAGCCTGGGCCTGACCC
CCAACTTCAAGAGCAACTTCGACCTGGCCGAGGATGCCAAACTGCAGCTGAGCAAGGACAC
CTACGACGACGACCTGGACAACCTGCTGGCCCAGATCGGCGACCAGTACGCCGACCTGTTTC
TGGCCGCCAAGAACCTGTCCGACGCCATCCTGCTGAGCGACATCCTGAGAGTGAACACCGAG
ATCACCAAGGCCCCCCTGAGCGCCTCTATGATCAAGAGATACGACGAGCACCACCAGGACCT
GACCCTGCTGAAAGCTCTCGTGCGGCAGCAGCTGCCTGAGAAGTACAAAGAGATTTTCTTCG
ACCAGAGCAAGAACGGCTACGCCGGCTACATTGACGGCGGAGCCAGCCAGGAAGAGTTCTA
CAAGTTCATCAAGCCCATCCTGGAAAAGATGGACGGCACCGAGGAACTGCTCGTGAAGCTGA
ACAGAGAGGACCTGCTGCGGAAGCAGCGGACCTTCGACAACGGCAGCATCCCCCACCAGAT
CCACCTGGGAGAGCTGCACGCCATTCTGCGGCGGCAGGAAGATTTTTACCCATTCCTGAAGG
ACAACCGGGAAAAGATCGAGAAGATCCTGACCTTCCGCATCCCCTACTACGTGGGCCCTCTG
GCCAGGGGAAACAGCAGATTCGCCTGGATGACCAGAAAGAGCGAGGAAACCATCACCCCCT
GGAACTTCGAGGAAGTGGTGGACAAGGGCGCTTCCGCCCAGAGCTTCATCGAGCGGATGAC
CAACTTCGATAAGAACCTGCCCAACGAGAAGGTGCTGCCCAAGCACAGCCTGCTGTACGAGT
ACTTCACCGTGTATAACGAGCTGACCAAAGTGAAATACGTGACCGAGGGAATGAGAAAGCCC
GCCTTCCTGAGCGGCGAGCAGAAAAAGGCCATCGTGGACCTGCTGTTCAAGACCAACCGGA
AAGTGACCGTGAAGCAGCTGAAAGAGGACTACTTCAAGAAAATCGAGTGCTTCGACTCCGTG
GAAATCTCCGGCGTGGAAGATCGGTTCAACGCCTCCCTGGGCACATACCACGATCTGCTGAA
AATTATCAAGGACAAGGACTTCCTGGACAATGAGGAAAACGAGGACATTCTGGAAGATATCG
TGCTGACCCTGACACTGTTTGAGGACAGAGAGATGATCGAGGAACGGCTGAAAACCTATGCC
CACCTGTTCGACGACAAAGTGATGAAGCAGCTGAAGCGGCGGAGATACACCGGCTGGGGCA
GGCTGAGCCGGAAGCTGATCAACGGCATCCGGGACAAGCAGTCCGGCAAGACAATCCTGGAT
TTCCTGAAGTCCGACGGCTTCGCCAACAGAAACTTCATGCAGCTGATCCACGACGACAGCCT
GACCTTTAAAGAGGACATCCAGAAAGCCCAGGTGTCCGGCCAGGGCGATAGCCTGCACGAGC
ACATTGCCAATCTGGCCGGCAGCCCCGCCATTAAGAAGGGCATCCTGCAGACAGTGAAGGTG
GTGGACGAGCTCGTGAAAGTGATGGGCCGGCACAAGCCCGAGAACATCGTGATCGAAATGG
CCAGAGAGAACCAGACCACCCAGAAGGGACAGAAGAACAGCCGCGAGAGAATGAAGCGGA
TCGAAGAGGGCATCAAAGAGCTGGGCAGCCAGATCCTGAAAGAACACCCCGTGGAAAACAC
CCAGCTGCAGAACGAGAAGCTGTACCTGTACTACCTGCAGAATGGGCGGGATATGTACGTGG
ACCAGGAACTGGACATCAACCGGCTGTCCGACTACGATGTGGACGCTATCGTGCCTCAGAGC
TTTCTGAAGGACGACTCCATCGACAACAAGGTGCTGACCAGAAGCGACAAGAACCGGGGCA
AGAGCGACAACGTGCCCTCCGAAGAGGTCGTGAAGAAGATGAAGAACTACTGGCGGCAGCT
GCTGAACGCCAAGCTGATTACCCAGAGAAAGTTCGACAATCTGACCAAGGCCGAGAGAGGC
GGCCTGAGCGAACTGGATAAGGCCGGCTTCATCAAGAGACAGCTGGTGGAAACCCGGCAGAT
CACAAAGCACGTGGCACAGATCCTGGACTCCCGGATGAACACTAAGTACGACGAGAATGACA
AGCTGATCCGGGAAGTGAAAGTGATCACCCTGAAGTCCAAGCTGGTGTCCGATTTCCGGAAG
GATTTCCAGTTTTACAAAGTGCGCGAGATCAACAACTACCACCACGCCCACGACGCCTACCTG
AACGCCGTCGTGGGAACCGCCCTGATCAAAAAGTACCCTAAGCTGGAAAGCGAGTTCGTGTA
CGGCGACTACAAGGTGTACGACGTGCGGAAGATGATCGCCAAGAGCGAGCAGGAAATCGGC
AAGGCTACCGCCAAGTACTTCTTCTACAGCAACATCATGAACTTTTTCAAGACCGAGATTACC
CTGGCCAACGGCGAGATCCGGAAGCGGCCTCTGATCGAGACAAACGGCGAAACCGGGGAGA
TCGTGTGGGATAAGGGCCGGGATTTTGCCACCGTGCGGAAAGTGCTGAGCATGCCCCAAGTG
AATATCGTGAAAAAGACCGAGGTGCAGACAGGCGGCTTCAGCAAAGAGTCTATCCTGCCCAA
GAGGAACAGCGATAAGCTGATCGCCAGAAAGAAGGACTGGGACCCTAAGAAGTACGGCGGC
TTCGACAGCCCCACCGTGGCCTATTCTGTGCTGGTGGTGGCCAAAGTGGAAAAGGGCAAGTC
CAAGAAACTGAAGAGTGTGAAAGAGCTGCTGGGGATCACCATCATGGAAAGAAGCAGCTTC
GAGAAGAATCCCATCGACTTTCTGGAAGCCAAGGGCTACAAAGAAGTGAAAAAGGACCTGA
TCATCAAGCTGCCTAAGTACTCCCTGTTCGAGCTGGAAAACGGCCGGAAGAGAATGCTGGCC
TCTGCCGGCGAACTGCAGAAGGGAAACGAACTGGCCCTGCCCTCCAAATATGTGAACTTCCT
GTACCTGGCCAGCCACTATGAGAAGCTGAAGGGCTCCCCCGAGGATAATGAGCAGAAACAGC
TGTTTGTGGAACAGCACAAGCACTACCTGGACGAGATCATCGAGCAGATCAGCGAGTTCTCC
AAGAGAGTGATCCTGGCCGACGCTAATCTGGACAAAGTGCTGTCCGCCTACAACAAGCACCG
GGATAAGCCCATCAGAGAGCAGGCCGAGAATATCATCCACCTGTTTACCCTGACCAATCTGGG
AGCCCCTGCCGCCTTCAAGTACTTTGACACCACCATCGACCGGAAGAGGTACACCAGCACCA
AAGAGGTGCTGGACGCCACCCTGATCCACCAGAGCATCACCGGCCTGTACGAGACACGGATC
GACCTGTCTCAGCTGGGAGGTGACTCTGGAGGATCTAGCGGAGGATCCTCTGGCAGCGAGAC
ACCAGGAACAAGCGAGTCAGCAACACCAGAGAGCAGTGGCGGCAGCAGCGGCGGCAGCAG
CACCCTAAATATAGAAGATGAGTATCGGCTACATGAGACCTCAAAAGAGCCAGATGTTTCTCT
AGGGTCCACATGGCTGTCTGATTTTCCTCAGGCCTGGGCGGAAACCGGGGGCATGGGACTGG
CAGTTCGCCAAGCTCCTCTGATCATACCTCTGAAAGCAACCTCTACCCCCGTGTCCATAAAAC
AATACCCCATGTCACAAGAAGCCAGACTGGGGATCAAGCCCCACATACAGAGACTGTTGGAC
CAGGGAATACTGGTACCCTGCCAGTCCCCCTGGAACACGCCCCTGCTACCCGTTAAGAAACC
AGGGACTAATGATTATAGGCCTGTCCAGGATCTGAGAGAAGTCAACAAGCGGGTGGAAGACA
TCCACCCCACCGTGCCCAACCCTTACAACCTCTTGAGCGGGCTCCCACCGTCCCACCAGTGGT
ACACTGTGCTTGATTTAAAGGATGCCTTTTTCTGCCTGAGACTCCACCCCACCAGTCAGCCTC
TCTTCGCCTTTGAGTGGAGAGATCCAGAGATGGGAATCTCAGGACAATTGACCTGGACCAGA
CTCCCACAGGGTTTCAAAAACAGTCCCACCCTGTTTAATGAGGCACTGCACAGAGACCTAGC
AGACTTCCGGATCCAGCACCCAGACTTGATCCTGCTACAGTACGTGGATGACTTACTGCTGGC
CGCCACTTCTGAGCTAGACTGCCAACAAGGTACTCGGGCCCTGTTACAAACCCTAGGGAACC
TCGGGTATCGGGCCTCGGCCAAGAAAGCCCAAATTTGCCAGAAACAGGTCAAGTATCTGGGG
TATCTTCTAAAAGAGGGTCAGAGATGGCTGACTGAGGCCAGAAAAGAGACTGTGATGGGGCA
GCCTACTCCGAAGACCCCTCGACAACTAAGGGAGTTCCTAGGGAAGGCAGGCTTCTGTCGCC
TCTTCATCCCTGGGTTTGCAGAAATGGCAGCCCCCCTGTACCCTCTCACCAAACCGGGGACTC
TGTTTAATTGGGGCCCAGACCAACAAAAGGCCTATCAAGAAATCAAGCAAGCTCTTCTAACTG
CCCCAGCCCTGGGGTTGCCAGATTTGACTAAGCCCTTTGAACTCTTTGTCGACGAGAAGCAG
GGCTACGCCAAAGGTGTCCTAACGCAAAAACTGGGACCTTGGCGTCGGCCGGTGGCCTACCT
GTCCAAAAAGCTAGACCCAGTAGCAGCTGGGTGGCCCCCTTGCCTACGGATGGTAGCAGCCA
TTGCCGTACTGACAAAGGATGCAGGCAAGCTAACCATGGGACAGCCACTAGTCATTCTGGCC
CCCCATGCAGTAGAGGCACTAGTCAAACAACCCCCCGACCGCTGGCTTTCCAACGCCCGGAT
GACTCACTATCAGGCCTTGCTTTTGGACACGGACCGGGTCCAGTTCGGACCGGTGGTAGCCCT
GAACCCGGCTACGCTGCTCCCACTGCCTGAGGAAGGGCTGCAACACAACTGCCTTGATATCC
TGGCCGAAGCCCACGGAACCCGACCCGACCTAACGGACCAGCCGCTCCCAGACGCCGACCA
CACCTGGTACACGGATGGAAGCAGTCTCTTACAAGAGGGACAGCGTAAGGCGGGAGCTGCG
GTGACCACCGAGACCGAGGTAATCTGGGCTAAAGCCCTGCCAGCCGGGACATCCGCTCAGCG
GGCTGAACTGATAGCACTCACCCAGGCCCTAAAGATGGCAGAAGGTAAGAAGCTAAATGTTT
ATACTGATAGCCGTTATGCTTTTGCTACTGCCCATATCCATGGAGAAATATACAGAAGGCGTGG
GTGGCTCACATCAGAAGGCAAAGAGATCAAAAATAAAGACGAGATCTTGGCCCTACTAAAAG
CCCTCTTTCTGCCCAAAAGACTTAGCATAATCCATTGTCCAGGACATCAAAAGGGACACAGCG
CCGAGGCTAGAGGCAACCGGATGGCTGACCAAGCGGCCCGAAAGGCAGCCATCACAGAGAC
TCCAGACACCTCTACCCTCCTCATAGAAAATTCATCACCCTCTGGCGGCTCAAAAAGAACCGC
CGACGGCAGCGAATTCGAGCCCAAGAAGAAGAGGAAAGTCTAACCGGTCATCATCACCATCA
CCATTGAGTTTAAACCCGCTGATCAGCCTCGACTGTGCCTTCTAGTTGCCAGCCATCTGTTGTT
TGCCCCTCCCCCGTGCCTTCCTTGACCCTGGAAGGTGCCACTCCCACTGTCCTTTCCTAATAA
AATGAGAAAATTGCATCGCATTGTCTGAGTAGGTGTCATTCTATTCTGGGGGGTGGGGTGGGG
CAGGACAGCAAGGGGGAGGATTGGGAAGACAATAGCAGGCATGCTGGGGATGCGGTGGGCT
CTATGGCTTCTGAGGCGGAAAGAACCAGCTGGGGCTCGATACCGTCGACCTCTAGCTAGAGC
TTGGCGTAATCATGGTCATAGCTGTTTCCTGTGTGAAATTGTTATCCGCTCACAATTCCACACA
ACATACGAGCCGGAAGCATAAAGTGTAAAGCCTAGGGTGCCTAATGAGTGAGCTAACTCACAT
TAATTGCGTTGCGCTCACTGCCCGCTTTCCAGTCGGGAAACCTGTCGTGCCAGCTGCATTAAT
GAATCGGCCAACGCGCGGGGAGAGGCGGTTTGCGTATTGGGCGCTCTTCCGCTTCCTCGCTC
ACTGACTCGCTGCGCTCGGTCGTTCGGCTGCGGCGAGCGGTATCAGCTCACTCAAAGGCGGT
AATACGGTTATCCACAGAATCAGGGGATAACGCAGGAAAGAACATGTGAGCAAAAGGCCAGC
AAAAGGCCAGGAACCGTAAAAAGGCCGCGTTGCTGGCGTTTTTCCATAGGCTCCGCCCCCCT
GACGAGCATCACAAAAATCGACGCTCAAGTCAGAGGTGGCGAAACCCGACAGGACTATAAA
GATACCAGGCGTTTCCCCCTGGAAGCTCCCTCGTGCGCTCTCCTGTTCCGACCCTGCCGCTTA
CCGGATACCTGTCCGCCTTTCTCCCTTCGGGAAGCGTGGCGCTTTCTCATAGCTCACGCTGTAG
GTATCTCAGTTCGGTGTAGGTCGTTCGCTCCAAGCTGGGCTGTGTGCACGAACCCCCCGTTCA
GCCCGACCGCTGCGCCTTATCCGGTAACTATCGTCTTGAGTCCAACCCGGTAAGACACGACTT
ATCGCCACTGGCAGCAGCCACTGGTAACAGGATTAGCAGAGCGAGGTATGTAGGCGGTGCTA
CAGAGTTCTTGAAGTGGTGGCCTAACTACGGCTACACTAGAAGAACAGTATTTGGTATCTGCG
CTCTGCTGAAGCCAGTTACCTTCGGAAAAAGAGTTGGTAGCTCTTGATCCGGCAAACAAACC
ACCGCTGGTAGCGGTGGTTTTTTTGTTTGCAAGCAGCAGATTACGCGCAGAAAAAAAGGATC
TCAAGAAGATCCTTTGATCTTTTCTACGGGGTCTGACGCTCAGTGGAACGAAAACTCACGTTA
AGGGATTTTGGTCATGAGATTATCAAAAAGGATCTTCACCTAGATCCTTTTAAATTAAAAATGA
AGTTTTAAATCAATCTAAAGTATATATGAGTAAACTTGGTCTGACAGTTACCAATGCTTAATCA
GTGAGGCACCTATCTCAGCGATCTGTCTATTTCGTTCATCCATAGTTGCCTGACTCCCCGTCGT
GTAGATAACTACGATACGGGAGGGCTTACCATCTGGCCCCAGTGCTGCAATGATACCGCGAGA
CCCACGCTCACCGGCTCCAGATTTATCAGCAATAAACCAGCCAGCCGGAAGGGCCGAGCGCA
GAAGTGGTCCTGCAACTTTATCCGCCTCCATCCAGTCTATTAATTGTTGCCGGGAAGCTAGAGT
AAGTAGTTCGCCAGTTAATAGTTTGCGCAACGTTGTTGCCATTGCTACAGGCATCGTGGTGTC
ACGCTCGTCGTTTGGTATGGCTTCATTCAGCTCCGGTTCCCAACGATCAAGGCGAGTTACATG
ATCCCCCATGTTGTGCAAAAAAGCGGTTAGCTCCTTCGGTCCTCCGATCGTTGTCAGAAGTAA
GTTGGCCGCAGTGTTATCACTCATGGTTATGGCAGCACTGCATAATTCTCTTACTGTCATGCCAT
CCGTAAGATGCTTTTCTGTGACTGGTGAGTACTCAACCAAGTCATTCTGAGAATAGTGTATGC
GGCGACCGAGTTGCTCTTGCCCGGCGTCAATACGGGATAATACCGCGCCACATAGCAGAACTT
TAAAAGTGCTCATCATTGGAAAACGTTCTTCGGGGCGAAAACTCTCAAGGATCTTACCGCTGT
TGAGATCCAGTTCGATGTAACCCACTCGTGCACCCAACTGATCTTCAGCATCTTTTACTTTCAC
CAGCGTTTCTGGGTGAGCAAAAACAGGAAGGCAAAATGCCGCAAAAAAGGGAATAAGGGCG
ACACGGAAATGTTGAATACTCATACTCTTCCTTTTTCAATATTATTGAAGCATTTATCAGGGTTA
TTGTCTCATGAGCGGATACATATTTGAATGTATTTAGAAAAATAAACAAATAGGGGTTCCGCGC
ACATTTCCCCGAAAAGTGCCACCTGACGTCGACGGATCGGGAGATCGATCTCCCGATCCCCTA
GGGTCGACTCTCAGTACAATCTGCTCTGATGCCGCATAGTTAAGCCAGTATCTGCTCCCTGCTT
GTGTGTTGGAGGTCGCTGAGTAGTGCGCGAGCAAAATTTAAGCTACAACAAGGCAAGGCTTG
ACCGACAATTGCATGAAGAATCTGCTTAGGGTTAGGCGTTTTGCGCTGCTTCGCGATGTACGG
GCCAGATATACGCGTTGACATTGATTATTGACTAGTTATTAATAGTAATCAATTACGGGGTCATT
AGTTCATAGCCCATATATGGAGTTCCGCGTTACATAACTTACGGTAAATGGCCCGCCTGGCTGA
CCGCCCAACGACCCCCGCCCATTGACGTCAATAATGACGTATGTTCCCATAGTAACGCCAATA
GGGACTTTCCATTGACGTCAATGGGTGGAGTATTTACGGTAAACTGCCCACTTGGCAGTACAT
CAAGTGTATCATATGCCAAGTACGCCCCCTATTGACGTCAATGACGGTAAATGGCCCGCCTGG
CATTATGCCCAGTACATGACCTTATGGGACTTTCCTACTTGGCAGTACATCTACGTATTAGTCAT
CGCTATTACCATGGTGATGCGGTTTTGGCAGTACATCAATGGGCGTGGATAGCGGTTTGACTCA
CGGGGATTTCCAAGTCTCCACCCCATTGACGTCAATGGGAGTTTGTTTTGGCACCAAAATCAA
CGGGACTTTCCAAAATGTCGTAACAACTCCGCCCCATTGACGCAAATGGGCGGTAGGCGTGTA
CGGTGGGAGGTCTATATAAGCAGAGCTGGTTTAGTGAACCGTCAGATCCGCTAGAGATCCGCG
GCCGCTAATACGACTCACTATAGGGAGAGCCGCCACC
N-terminal NLS + Cas9 H840A
Flexible linker
M-MLV reverse transcriptase + C-terminal NLS
Plasmid backbone (containing CMV promoter and AmpR)
pU6-HEK3_PEgRNA_CTTins:
(SEQ ID NO: 735)
GAGGGCCTATTTCCCATGATTCCTTCATATTTGCATATACGATACAAGGCTGTTAGAGAGATAAT
TAGAATTAATTTGACTGTAAACACAAAGATATTAGTACAAAATACGTGACGTAGAAAGTAATAA
TTTCTTGGGTAGTTTGCAGTTTTAAAATTATGTTTTAAAATGGACTATCATATGCTTACCGTAAC
TTGAAAGTATTTCGATTTCTTGGCTTTATATATCTTGTGGAAAGGACGAAACACCGGCCCAGAC
TGAGCACGTGAGTTTTAGAGCTAGAAATAGCAAGTTAAAATAAGGCTAGTCCGTTATCAACTTG
AAAAAGTGGGACCGAGTCGGTCCTCTGCCATCAAAGCGTGCTCAGTCTGTTTTTTTAAGCT
TGGGCCGCTCGAGGTACCTCTCTACATATGACATGTGAGCAAAAGGCCAGCAAAAGGCCAGG
AACCGTAAAAAGGCCGCGTTGCTGGCGTTTTTCCATAGGCTCCGCCCCCCTGACGAGCATCAC
AAAAATCGACGCTCAAGTCAGAGGTGGCGAAACCCGACAGGACTATAAAGATACCAGGCGTT
TCCCCCTGGAAGCTCCCTCGTGCGCTCTCCTGTTCCGACCCTGCCGCTTACCGGATACCTGTC
CGCCTTTCTCCCTTCGGGAAGCGTGGCGCTTTCTCATAGCTCACGCTGTAGGTATCTCAGTTCG
GTGTAGGTCGTTCGCTCCAAGCTGGGCTGTGTGCACGAACCCCCCGTTCAGCCCGACCGCTG
CGCCTTATCCGGTAACTATCGTCTTGAGTCCAACCCGGTAAGACACGACTTATCGCCACTGGC
AGCAGCCACTGGTAACAGGATTAGCAGAGCGAGGTATGTAGGCGGTGCTACAGAGTTCTTGA
AGTGGTGGCCTAACTACGGCTACACTAGAAGAACAGTATTTGGTATCTGCGCTCTGCTGAAGC
CAGTTACCTTCGGAAAAAGAGTTGGTAGCTCTTGATCCGGCAAACAAACCACCGCTGGTAGC
GGTGGTTTTTTTGTTTGCAAGCAGCAGATTACGCGCAGAAAAAAAGGATCTCAAGAAGATCC
TTTGATCTTTTCTACGGGGTCTGACGCTCAGTGGAACGAAAACTCACGTTAAGGGATTTTGGT
CATGAGATTATCAAAAAGGATCTTCACCTAGATCCTTTTAAATTAAAAATGAAGTTTTAAATCA
ATCTAAAGTATATATGAGTAAACTTGGTCTGACAGTTACCAATGCTTAATCAGTGAGGCACCTA
TCTCAGCGATCTGTCTATTTCGTTCATCCATAGTTGCCTGACTCCCCGTCGTGTAGATAACTACG
ATACGGGAGGGCTTACCATCTGGCCCCAGTGCTGCAATGATACCGCGAGACCCACGCTCACCG
GCTCCAGATTTATCAGCAATAAACCAGCCAGCCGGAAGGGCCGAGCGCAGAAGTGGTCCTGC
AACTTTATCCGCCTCCATCCAGTCTATTAATTGTTGCCGGGAAGCTAGAGTAAGTAGTTCGCCA
GTTAATAGTTTGCGCAACGTTGTTGCCATTGCTACAGGCATCGTGGTGTCACGCTCGTCGTTTG
GTATGGCTTCATTCAGCTCCGGTTCCCAACGATCAAGGCGAGTTACATGATCCCCCATGTTGTG
CAAAAAAGCGGTTAGCTCCTTCGGTCCTCCGATCGTTGTCAGAAGTAAGTTGGCCGCAGTGTT
ATCACTCATGGTTATGGCAGCACTGCATAATTCTCTTACTGTCATGCCATCCGTAAGATGCTTTT
CTGTGACTGGTGAGTACTCAACCAAGTCATTCTGAGAATAGTGTATGCGGCGACCGAGTTGCT
CTTGCCCGGCGTCAATACGGGATAATACCGCGCCACATAGCAGAACTTTAAAAGTGCTCATCA
TTGGAAAACGTTCTTCGGGGCGAAAACTCTCAAGGATCTTACCGCTGTTGAGATCCAGTTCGA
TGTAACCCACTCGTGCACCCAACTGATCTTCAGCATCTTTTACTTTCACCAGCGTTTCTGGGTG
AGCAAAAACAGGAAGGCAAAATGCCGCAAAAAAGGGAATAAGGGCGACACGGAAATGTTG
AATACTCATACTCTTCCTTTTTCAATATTATTGAAGCATTTATCAGGGTTATTGTCTCATGAGCGG
ATACATATTTGAATGTATTTAGAAAAATAAACAAATAGGGGTTCCGCGCACATTTCCCCGAAAA
GTGCCACCTGACGTCGCTAGCTGTACAAAAAAGCAGGCTTTAAAGGAACCAATTCAGTCGAC
TGGATCCGGTACCAAGGTCGGGCAGGAA
U6 Promoter sequence
Spacer sequence
sgRNA scaffold
3′ extension (contains PBS and RT template)
Backbone (contains AmpR)
pLenti-hSyn-N-PE2-NpuN-P2A-GFP-KASH_U6-DNMT1-PEgRNA:
(SEQ ID NO: 736)
GTCGACGGATCGGGAGATCTCCCGATCCCCTATGGTGCACTCTCAGTACAATCTGCTCTGATGCCGC
ATAGTTAAGCCAGTATCTGCTCCCTGCTTGTGTGTTGGAGGTCGCTGAGTAGTGCGCGAGCAAAATT
TAAGCTACAACAAGGCAAGGCTTGACCGACAATTGCATGAAGAATCTGCTTAGGGTTAGGCGTTTT
GCGCTGCTTCGCGATGTACGGGCCAGATATACGCGTTGACATTGATTATTGACTAGTTATTAATAGTA
ATCAATTACGGGGTCATTAGTTCATAGCCCATATATGGAGTTCCGCGTTACATAACTTACGGTAAATG
GCCCGCCTGGCTGACCGCCCAACGACCCCCGCCCATTGACGTCAATAATGACGTATGTTCCCATAGT
AACGCCAATAGGGACTTTCCATTGACGTCAATGGGTGGAGTATTTACGGTAAACTGCCCACTTGGC
AGTACATCAAGTGTATCATATGCCAAGTACGCCCCCTATTGACGTCAATGACGGTAAATGGCCCGCC
TGGCATTATGCCCAGTACATGACCTTATGGGACTTTCCTACTTGGCAGTACATCTACGTATTAGTCAT
CGCTATTACCATGGTGATGCGGTTTTGGCAGTACATCAATGGGCGTGGATAGCGGTTTGACTCACGG
GGATTTCCAAGTCTCCACCCCATTGACGTCAATGGGAGTTTGTTTTGGCACCAAAATCAACGGGAC
TTTCCAAAATGTCGTAACAACTCCGCCCCATTGACGCAAATGGGCGGTAGGCGTGTACGGTGGGAG
GTCTATATAAGCAGCGCGTTTTGCCTGTACTGGGTCTCTCTGGTTAGACCAGATCTGAGCCTGGGAG
CTCTCTGGCTAACTAGGGAACCCACTGCTTAAGCCTCAATAAAGCTTGCCTTGAGTGCTTCAAGTA
GTGTGTGCCCGTCTGTTGTGTGACTCTGGTAACTAGAGATCCCTCAGACCCTTTTAGTCAGTGTGGA
AAATCTCTAGCAGTGGCGCCCGAACAGGGACTTGAAAGCGAAAGGGAAACCAGAGGAGCTCTCT
CGACGCAGGACTCGGCTTGCTGAAGCGCGCACGGCAAGAGGCGAGGGGCGGCGACTGGTGAGTA
CGCCAAAAATTTTGACTAGCGGAGGCTAGAAGGAGAGAGATGGGTGCGAGAGCGTCAGTATTAAG
CGGGGGAGAATTAGATCGCGATGGGAAAAAATTCGGTTAAGGCCAGGGGGAAAGAAAAAATATAA
ATTAAAACATATAGTATGGGCAAGCAGGGAGCTAGAACGATTCGCAGTTAATCCTGGCCTGTTAGAA
ACATCAGAAGGCTGTAGACAAATACTGGGACAGCTACAACCATCCCTTCAGACAGGATCAGAAGA
ACTTAGATCATTATATAATACAGTAGCAACCCTCTATTGTGTGCATCAAAGGATAGAGATAAAAGACA
CCAAGGAAGCTTTAGACAAGATAGAGGAAGAGCAAAACAAAAGTAAGACCACCGCACAGCAAGC
GGCCGCTGATCTTCAGACCTGGAGGAGGAGATATGAGGGACAATTGGAGAAGTGAATTATATAAAT
ATAAAGTAGTAAAAATTGAACCATTAGGAGTAGCACCCACCAAGGCAAAGAGAAGAGTGGTGCAG
AGAGAAAAAAGAGCAGTGGGAATAGGAGCTTTGTTCCTTGGGTTCTTGGGAGCAGCAGGAAGCAC
TATGGGCGCAGCGTCAATGACGCTGACGGTACAGGCCAGACAATTATTGTCTGGTATAGTGCAGCA
GCAGAACAATTTGCTGAGGGCTATTGAGGCGCAACAGCATCTGTTGCAACTCACAGTCTGGGGCAT
CAAGCAGCTCCAGGCAAGAATCCTGGCTGTGGAAAGATACCTAAAGGATCAACAGCTCCTGGGGA
TTTGGGGTTGCTCTGGAAAACTCATTTGCACCACTGCTGTGCCTTGGAATGCTAGTTGGAGTAATAA
ATCTCTGGAACAGATTTGGAATCACACGACCTGGATGGAGTGGGACAGAGAAATTAACAATTACAC
AAGCTTAATACACTCCTTAATTGAAGAATCGCAAAACCAGCAAGAAAAGAATGAACAAGAATTATT
GGAATTAGATAAATGGGCAAGTTTGTGGAATTGGTTTAACATAACAAATTGGCTGTGGTATATAAAA
TTATTCATAATGATAGTAGGAGGCTTGGTAGGTTTAAGAATAGTTTTTGCTGTACTTTCTATAGTGAAT
AGAGTTAGGCAGGGATATTCACCATTATCGTTTCAGACCCACCTCCCAACCCCGAGGGGACCCGAC
AGGCCCGAAGGAATAGAAGAAGAAGGTGGAGAGAGAGACAGAGACAGATCCATTCGATTAGTGA
ACGGATCGGCACTGCGTGCGCCAATTCTGCAGACAAATGGCAGTATTCATCCACAATTTTAAAAGA
AAAGGGGGGATTGGGGGGTACAGTGCAGGGGAAAGAATAGTAGACATAATAGCAACAGACATACA
AACTAAAGAATTACAAAAACAAATTACAAAAATTCAAAATTTTCGGGTTTATTACAGGGACAGCAG
AGATCCAGTTTGGTTAATTAAGGTACCAAGGTCGGGCAGGAAGAGGGCCTATTTCCCATGATTCCTT
CATATTTGCATATACGATACAAGGCTGTTAGAGAGATAATTAGAATTAATTTGACTGTAAACACAAAG
ATATTAGTACAAAATACGTGACGTAGAAAGTAATAATTTCTTGGGTAGTTTGCAGTTTTAAAATTATG
TTTTAAAATGGACTATCATATGCTTACCGTAACTTGAAAGTATTTCGATTTCTTGGCTTTATATATCTTG
TGGAAAGGACGAAACACCGCGGGCTGGAGCTGTTCGCGCGTTTTAGAGCTAGAAATAGCAAG
TTAAAATAAGGCTAGTCCGTTATCAACTTGAAAAAGTGGCACCGAGTCGGTGCAAGATGCAA
GCGCGAACAGCTCCAGTTTTTTTGAATTCAGTGCAAGTGGGTTTTAGGACCAGGATGAGGCGGGG
TGGGGGTGCCTACCTGACGACCGACCCCGACCCACTGGACAAGCACCCAACCCCCATTCCCCAAATTGC
GCATCCCCTATCAGAGAGGGGGAGGGGAAACAGGATGCGGCGAGGCGCGTGCGCACTGCCAGCTTCA
GCACCGCGGACAGTGCCTTCGCCCCCGCCTGGCGGCGCGCGCCACCGCCGCCTCAGCACTGAAGGCG
CGCTGACGTCACTCGCCGGTCCCCCGCAAACTCCCCTTCCCGGCCACCTTGGTCGCGTCCGCGCCGCC
GCCGGCCCAGCCGGACCGCACCACGCGAGGCGCGAGATAGGGGGGCACGGGCGCGACCATCTGCGC
TGCGGCGCCGGCGACTCAGCGCTGCCTCAGTCTGCGGTGGGCAGCGGAGGAGTCGTGTCGTGCCTGA
GAGCGCAG [symbol] ATGAAACGGACAGCCGACGGAAGCGAGTTCGAG
TCACCAAAGAAGAAGCGGAAAGTCGACAAGAAGTACAGCATCGGCCTGGACATCGGCACCAACT
CTGTGGGCTGGGCCGTGATCACCGACGAGTACAAGGTGCCCAGCAAGAAATTCAAGGTGCTGGGC
AACACCGACCGGCACAGCATCAAGAAGAACCTGATCGGAGCCCTGCTGTTCGACAGCGGCGAAAC
AGCCGAGGCCACCCGGCTGAAGAGAACCGCCAGAAGAAGATACACCAGACGGAAGAACCGGATC
TGCTATCTGCAAGAGATCTTCAGCAACGAGATGGCCAAGGTGGACGACAGCTTCTTCCACAGACTG
GAAGAGTCCTTCCTGGTGGAAGAGGATAAGAAGCACGAGCGGCACCCCATCTTCGGCAACATCGT
GGACGAGGTGGCCTACCACGAGAAGTACCCCACCATCTACCACCTGAGAAAGAAACTGGTGGACA
GCACCGACAAGGCCGACCTGCGGCTGATCTATCTGGCCCTGGCCCACATGATCAAGTTCCGGGGCC
ACTTCCTGATCGAGGGCGACCTGAACCCCGACAACAGCGACGTGGACAAGCTGTTCATCCAGCTG
GTGCAGACCTACAACCAGCTGTTCGAGGAAAACCCCATCAACGCCAGCGGCGTGGACGCCAAGGC
CATCCTGTCTGCCAGACTGAGCAAGAGCAGACGGCTGGAAAATCTGATCGCCCAGCTGCCCGGCG
AGAAGAAGAATGGCCTGTTCGGAAACCTGATTGCCCTGAGCCTGGGCCTGACCCCCAACTTCAAG
AGCAACTTCGACCTGGCCGAGGATGCCAAACTGCAGCTGAGCAAGGACACCTACGACGACGACCT
GGACAACCTGCTGGCCCAGATCGGCGACCAGTACGCCGACCTGTTTCTGGCCGCCAAGAACCTGT
CCGACGCCATCCTGCTGAGCGACATCCTGAGAGTGAACACCGAGATCACCAAGGCCCCCCTGAGC
GCCTCTATGATCAAGAGATACGACGAGCACCACCAGGACCTGACCCTGCTGAAAGCTCTCGTGCGG
CAGCAGCTGCCTGAGAAGTACAAAGAGATTTTCTTCGACCAGAGCAAGAACGGCTACGCCGGCTA
CATTGACGGCGGAGCCAGCCAGGAAGAGTTCTACAAGTTCATCAAGCCCATCCTGGAAAAGATGG
ACGGCACCGAGGAACTGCTCGTGAAGCTGAACAGAGAGGACCTGCTGCGGAAGCAGCGGACCTT
CGACAACGGCAGCATCCCCCACCAGATCCACCTGGGAGAGCTGCACGCCATTCTGCGGCGGCAGG
AAGATTTTTACCCATTCCTGAAGGACAACCGGGAAAAGATCGAGAAGATCCTGACCTTCCGCATCC
CCTACTACGTGGGCCCTCTGGCCAGGGGAAACAGCAGATTCGCCTGGATGACCAGAAAGAGCGAG
GAAACCATCACCCCCTGGAACTTCGAGGAAGTGGTGGACAAGGGCGCTTCCGCCCAGAGCTTCAT
CGAGCGGATGACCAACTTCGATAAGAACCTGCCCAACGAGAAGGTGCTGCCCAAGCACAGCCTGC
TGTACGAGTACTTCACCGTGTATAACGAGCTGACCAAAGTGAAATACGTGACCGAGGGAATGAGAA
AGCCCGCCTTCCTGAGCGGCGAGCAGAAAAAGGCCATCGTGGACCTGCTGTTCAAGACCAACCGG
AAAGTGACCGTGAAGCAGCTGAAAGAGGACTACTTCAAGAAAATCGAGTGCCTGTCCTACGAGACA
GAGATCCTGACAGTGGAGTATGGCCTGCTGCCAATCGGCAAGATCGTGGAGAAGAGGATCGAGTGTACC
GTGTACTCTGTGGATAACAATGGCAACATCTATACACAGCCCGTGGCACAGTGGCACGATAGGGGAGAGC
AGGAGGTGTTCGAGTATTGCCTGGAGGACGGCAGCCTGATCAGGGCAACCAAGGACCACAAGTTCATGA
CAGTGGATGGCCAGATGCTGCCCATCGACGAGATTTTCGAGCGGGAGCTGGACCTGATGAGAGTGGATA
ACCTGCCTAAT

[symbol]

[symbol]

[symbol]

[symbol]

[symbol]

[symbol]

[symbol]

[symbol]

[symbol]

[symbol]

[symbol]

[symbol]

[symbol]

[symbol]

[symbol]

[symbol]

[symbol]

[symbol]

[symbol]

[symbol]

[symbol]

[symbol]

[symbol]

[symbol]

[symbol]

[symbol]

[symbol]

[symbol]

[symbol]

[symbol]

[symbol]

[symbol]

[symbol]

[symbol]

[symbol]

[symbol]

[symbol]

[symbol]

[symbol]

[symbol]

[symbol]

[symbol]

[symbol]

[symbol]

[symbol]

[symbol]

[symbol]

[symbol]

[symbol]

[symbol]

[symbol]

ACGC
GTTAAGTCGACAATCAACCTCTGGATTACAAAATTTGTGAAAGATTGACTGGTATTCTTAACTATGTT
GCTCCTTTTACGCTATGTGGATACGCTGCTTTAATGCCTTTGTATCATGCTATTGCTTCCCGTATGGCT
TTCATTTTCTCCTCCTTGTATAAATCCTGGTTGCTGTCTCTTTATGAGGAGTTGTGGCCCGTTGTCAG
GCAACGTGGCGTGGTGTGCACTGTGTTTGCTGACGCAACCCCCACTGGTTGGGGCATTGCCACCAC
CTGTCAGCTCCTTTCCGGGACTTTCGCTTTCCCCCTCCCTATTGCCACGGCGGAACTCATCGCCGCC
TGCCTTGCCCGCTGCTGGACAGGGGCTCGGCTGTTGGGCACTGACAATTCCGTGGTGTTGTCGGGG
AAATCATCGTCCTTTCCTTGGCTGCTCGCCTGTGTTGCCACCTGGATTCTGCGCGGGACGTCCTTCT
GCTACGTCCCTTCGGCCCTCAATCCAGCGGACCTTCCTTCCCGCGGCCTGCTGCCGGCTCTGCGGC
CTCTTCCGCGTCTTCGCCTTCGCCCTCAGACGAGTCGGATCTCCCTTTGGGCCGCCTCCCCGCGTCG
ACTTTAAGACCAATGACTTACAAGGCAGCTGTAGATCTTAGCCACTTTTTAAAAGAAAAGGGGGGA
CTGGAAGGGCTAATTCACTCCCAACGAAGACAAGATCTGCTTTTTGCTTGTACTGGGTCTCTCTGGT
TAGACCAGATCTGAGCCTGGGAGCTCTCTGGCTAACTAGGGAACCCACTGCTTAAGCCTCAATAAA
GCTTGCCTTGAGTGCTTCAAGTAGTGTGTGCCCGTCTGTTGTGTGACTCTGGTAACTAGAGATCCCT
CAGACCCTTTTAGTCAGTGTGGAAAATCTCTAGCAGGGCCCGTTTAAACCCGCTGATCAGCCTCGA
CTGTGCCTTCTAGTTGCCAGCCATCTGTTGTTTGCCCCTCCCCCGTGCCTTCCTTGACCCTGGAAGG
TGCCACTCCCACTGTCCTTTCCTAATAAAATGAGGAAATTGCATCGCATTGTCTGAGTAGGTGTCAT
TCTATTCTGGGGGGTGGGGTGGGGCAGGACAGCAAGGGGGAGGATTGGGAAGACAATAGCAGGC
ATGCTGGGGATGCGGTGGGCTCTATGGCTTCTGAGGCGGAAAGAACCAGCTGGGGCTCTAGGGGG
TATCCCCACGCGCCCTGTAGCGGCGCATTAAGCGCGGCGGGTGTGGTGGTTACGCGCAGCGTGACC
GCTACACTTGCCAGCGCCCTAGCGCCCGCTCCTTTCGCTTTCTTCCCTTCCTTTCTCGCCACGTTCG
CCGGCTTTCCCCGTCAAGCTCTAAATCGGGGGCTCCCTTTAGGGTTCCGATTTAGTGCTTTACGGCA
CCTCGACCCCAAAAAACTTGATTAGGGTGATGGTTCACGTAGTGGGCCATCGCCCTGATAGACGGT
TTTTCGCCCTTTGACGTTGGAGTCCACGTTCTTTAATAGTGGACTCTTGTTCCAAACTGGAACAACA
CTCAACCCTATCTCGGTCTATTCTTTTGATTTATAAGGGATTTTGCCGATTTCGGCCTATTGGTTAAAA
AATGAGCTGATTTAACAAAAATTTAACGCGAATTAATTCTGTGGAATGTGTGTCAGTTAGGGTGTGG
AAAGTCCCCAGGCTCCCCAGCAGGCAGAAGTATGCAAAGCATGCATCTCAATTAGTCAGCAACCAG
GTGTGGAAAGTCCCCAGGCTCCCCAGCAGGCAGAAGTATGCAAAGCATGCATCTCAATTAGTCAGC
AACCATAGTCCCGCCCCTAACTCCGCCCATCCCGCCCCTAACTCCGCCCAGTTCCGCCCATTCTCCG
CCCCATGGCTGACTAATTTTTTTTATTTATGCAGAGGCCGAGGCCGCCTCTGCCTCTGAGCTATTCCA
GAAGTAGTGAGGAGGCTTTTTTGGAGGCCTAGGCTTTTGCAAAAAGCTCCCGGGAGCTTGTATATC
CATTTTCGGATCTGATCAGCACGTGTTGACAATTAATCATCGGCATAGTATATCGGCATAGTATAATAC
GACAAGGTGAGGAACTAAACCATGGCCAAGTTGACCAGTGCCGTTCCGGTGCTCACCGCGCGCGA
CGTCGCCGGAGCGGTCGAGTTCTGGACCGACCGGCTCGGGTTCTCCCGGGACTTCGTGGAGGACG
ACTTCGCCGGTGTGGTCCGGGACGACGTGACCCTGTTCATCAGCGCGGTCCAGGACCAGGTGGTG
CCGGACAACACCCTGGCCTGGGTGTGGGTGCGCGGCCTGGACGAGCTGTACGCCGAGTGGTCGGA
GGTCGTGTCCACGAACTTCCGGGACGCCTCCGGGCCGGCCATGACCGAGATCGGCGAGCAGCCGT
GGGGGCGGGAGTTCGCCCTGCGCGACCCGGCCGGCAACTGCGTGCACTTCGTGGCCGAGGAGCA
GGACTGACACGTGCTACGAGATTTCGATTCCACCGCCGCCTTCTATGAAAGGTTGGGCTTCGGAAT
CGTTTTCCGGGACGCCGGCTGGATGATCCTCCAGCGCGGGGATCTCATGCTGGAGTTCTTCGCCCA
CCCCAACTTGTTTATTGCAGCTTATAATGGTTACAAATAAAGCAATAGCATCACAAATTTCACAAATA
AAGCATTTTTTTCACTGCATTCTAGTTGTGGTTTGTCCAAACTCATCAATGTATCTTATCATGTCTGTA
TACCGTCGACCTCTAGCTAGAGCTTGGCGTAATCATGGTCATAGCTGTTTCCTGTGTGAAATTGTTAT
CCGCTCACAATTCCACACAACATACGAGCCGGAAGCATAAAGTGTAAAGCCTGGGGTGCCTAATGA
GTGAGCTAACTCACATTAATTGCGTTGCGCTCACTGCCCGCTTTCCAGTCGGGAAACCTGTCGTGCC
AGCTGCATTAATGAATCGGCCAACGCGCGGGGAGAGGCGGTTTGCGTATTGGGCGCTCTTCCGCTT
CCTCGCTCACTGACTCGCTGCGCTCGGTCGTTCGGCTGCGGCGAGCGGTATCAGCTCACTCAAAGG
CGGTAATACGGTTATCCACAGAATCAGGGGATAACGCAGGAAAGAACATGTGAGCAAAAGGCCAG
CAAAAGGCCAGGAACCGTAAAAAGGCCGCGTTGCTGGCGTTTTTCCATAGGCTCCGCCCCCCTGAC
GAGCATCACAAAAATCGACGCTCAAGTCAGAGGTGGCGAAACCCGACAGGACTATAAAGATACCA
GGCGTTTCCCCCTGGAAGCTCCCTCGTGCGCTCTCCTGTTCCGACCCTGCCGCTTACCGGATACCTG
TCCGCCTTTCTCCCTTCGGGAAGCGTGGCGCTTTCTCATAGCTCACGCTGTAGGTATCTCAGTTCGG
TGTAGGTCGTTCGCTCCAAGCTGGGCTGTGTGCACGAACCCCCCGTTCAGCCCGACCGCTGCGCCT
TATCCGGTAACTATCGTCTTGAGTCCAACCCGGTAAGACACGACTTATCGCCACTGGCAGCAGCCA
CTGGTAACAGGATTAGCAGAGCGAGGTATGTAGGCGGTGCTACAGAGTTCTTGAAGTGGTGGCCTA
ACTACGGCTACACTAGAAGAACAGTATTTGGTATCTGCGCTCTGCTGAAGCCAGTTACCTTCGGAA
AAAGAGTTGGTAGCTCTTGATCCGGCAAACAAACCACCGCTGGTAGCGGTGGTTTTTTTGTTTGCA
AGCAGCAGATTACGCGCAGAAAAAAAGGATCTCAAGAAGATCCTTTGATCTTTTCTACGGGGTCTG
ACGCTCAGTGGAACGAAAACTCACGTTAAGGGATTTTGGTCATGAGATTATCAAAAAGGATCTTCA
CCTAGATCCTTTTAAATTAAAAATGAAGTTTTAAATCAATCTAAAGTATATATGAGTAAACTTGGTCT
GACAGTTACCAATGCTTAATCAGTGAGGCACCTATCTCAGCGATCTGTCTATTTCGTTCATCCATAGT
TGCCTGACTCCCCGTCGTGTAGATAACTACGATACGGGAGGGCTTACCATCTGGCCCCAGTGCTGCA
ATGATACCGCGAGACCCACGCTCACCGGCTCCAGATTTATCAGCAATAAACCAGCCAGCCGGAAGG
GCCGAGCGCAGAAGTGGTCCTGCAACTTTATCCGCCTCCATCCAGTCTATTAATTGTTGCCGGGAAG
CTAGAGTAAGTAGTTCGCCAGTTAATAGTTTGCGCAACGTTGTTGCCATTGCTACAGGCATCGTGGT
GTCACGCTCGTCGTTTGGTATGGCTTCATTCAGCTCCGGTTCCCAACGATCAAGGCGAGTTACATGA
TCCCCCATGTTGTGCAAAAAAGCGGTTAGCTCCTTCGGTCCTCCGATCGTTGTCAGAAGTAAGTTG
GCCGCAGTGTTATCACTCATGGTTATGGCAGCACTGCATAATTCTCTTACTGTCATGCCATCCGTAAG
ATGCTTTTCTGTGACTGGTGAGTACTCAACCAAGTCATTCTGAGAATAGTGTATGCGGCGACCGAGT
TGCTCTTGCCCGGCGTCAATACGGGATAATACCGCGCCACATAGCAGAACTTTAAAAGTGCTCATCA
TTGGAAAACGTTCTTCGGGGCGAAAACTCTCAAGGATCTTACCGCTGTTGAGATCCAGTTCGATGT
AACCCACTCGTGCACCCAACTGATCTTCAGCATCTTTTACTTTCACCAGCGTTTCTGGGTGAGCAAA
AACAGGAAGGCAAAATGCCGCAAAAAAGGGAATAAGGGCGACACGGAAATGTTGAATACTCATAC
TCTTCCTTTTTCAATATTATTGAAGCATTTATCAGGGTTATTGTCTCATGAGCGGATACATATTTGAAT
GTATTTAGAAAAATAAACAAATAGGGGTTCCGCGCACATTTCCCCGAAAAGTGCCACCTGAC
U6promoter
PEgRNA
hSynpromoter
N-termPE2
N-termNpu

[symbol]

pLenti-hSyn-C-PE2-NpuC:
(SEQ ID NO: 737)
GTCGACGGATCGGGAGATCTCCCGATCCCCTATGGTGCACTCTCAGTACAATCTGCTCTGATGCCGC
ATAGTTAAGCCAGTATCTGCTCCCTGCTTGTGTGTTGGAGGTCGCTGAGTAGTGCGCGAGCAAAATT
TAAGCTACAACAAGGCAAGGCTTGACCGACAATTGCATGAAGAATCTGCTTAGGGTTAGGCGTTTT
GCGCTGCTTCGCGATGTACGGGCCAGATATACGCGTTGACATTGATTATTGACTAGTTATTAATAGTA
ATCAATTACGGGGTCATTAGTTCATAGCCCATATATGGAGTTCCGCGTTACATAACTTACGGTAAATG
GCCCGCCTGGCTGACCGCCCAACGACCCCCGCCCATTGACGTCAATAATGACGTATGTTCCCATAGT
AACGCCAATAGGGACTTTCCATTGACGTCAATGGGTGGAGTATTTACGGTAAACTGCCCACTTGGC
AGTACATCAAGTGTATCATATGCCAAGTACGCCCCCTATTGACGTCAATGACGGTAAATGGCCCGCC
TGGCATTATGCCCAGTACATGACCTTATGGGACTTTCCTACTTGGCAGTACATCTACGTATTAGTCAT
CGCTATTACCATGGTGATGCGGTTTTGGCAGTACATCAATGGGCGTGGATAGCGGTTTGACTCACGG
GGATTTCCAAGTCTCCACCCCATTGACGTCAATGGGAGTTTGTTTTGGCACCAAAATCAACGGGAC
TTTCCAAAATGTCGTAACAACTCCGCCCCATTGACGCAAATGGGCGGTAGGCGTGTACGGTGGGAG
GTCTATATAAGCAGCGCGTTTTGCCTGTACTGGGTCTCTCTGGTTAGACCAGATCTGAGCCTGGGAG
CTCTCTGGCTAACTAGGGAACCCACTGCTTAAGCCTCAATAAAGCTTGCCTTGAGTGCTTCAAGTA
GTGTGTGCCCGTCTGTTGTGTGACTCTGGTAACTAGAGATCCCTCAGACCCTTTTAGTCAGTGTGGA
AAATCTCTAGCAGTGGCGCCCGAACAGGGACTTGAAAGCGAAAGGGAAACCAGAGGAGCTCTCT
CGACGCAGGACTCGGCTTGCTGAAGCGCGCACGGCAAGAGGCGAGGGGCGGCGACTGGTGAGTA
CGCCAAAAATTTTGACTAGCGGAGGCTAGAAGGAGAGAGATGGGTGCGAGAGCGTCAGTATTAAG
CGGGGGAGAATTAGATCGCGATGGGAAAAAATTCGGTTAAGGCCAGGGGGAAAGAAAAAATATAA
ATTAAAACATATAGTATGGGCAAGCAGGGAGCTAGAACGATTCGCAGTTAATCCTGGCCTGTTAGAA
ACATCAGAAGGCTGTAGACAAATACTGGGACAGCTACAACCATCCCTTCAGACAGGATCAGAAGA
ACTTAGATCATTATATAATACAGTAGCAACCCTCTATTGTGTGCATCAAAGGATAGAGATAAAAGACA
CCAAGGAAGCTTTAGACAAGATAGAGGAAGAGCAAAACAAAAGTAAGACCACCGCACAGCAAGC
GGCCGCTGATCTTCAGACCTGGAGGAGGAGATATGAGGGACAATTGGAGAAGTGAATTATATAAAT
ATAAAGTAGTAAAAATTGAACCATTAGGAGTAGCACCCACCAAGGCAAAGAGAAGAGTGGTGCAG
AGAGAAAAAAGAGCAGTGGGAATAGGAGCTTTGTTCCTTGGGTTCTTGGGAGCAGCAGGAAGCAC
TATGGGCGCAGCGTCAATGACGCTGACGGTACAGGCCAGACAATTATTGTCTGGTATAGTGCAGCA
GCAGAACAATTTGCTGAGGGCTATTGAGGCGCAACAGCATCTGTTGCAACTCACAGTCTGGGGCAT
CAAGCAGCTCCAGGCAAGAATCCTGGCTGTGGAAAGATACCTAAAGGATCAACAGCTCCTGGGGA
TTTGGGGTTGCTCTGGAAAACTCATTTGCACCACTGCTGTGCCTTGGAATGCTAGTTGGAGTAATAA
ATCTCTGGAACAGATTTGGAATCACACGACCTGGATGGAGTGGGACAGAGAAATTAACAATTACAC
AAGCTTAATACACTCCTTAATTGAAGAATCGCAAAACCAGCAAGAAAAGAATGAACAAGAATTATT
GGAATTAGATAAATGGGCAAGTTTGTGGAATTGGTTTAACATAACAAATTGGCTGTGGTATATAAAA
TTATTCATAATGATAGTAGGAGGCTTGGTAGGTTTAAGAATAGTTTTTGCTGTACTTTCTATAGTGAAT
AGAGTTAGGCAGGGATATTCACCATTATCGTTTCAGACCCACCTCCCAACCCCGAGGGGACCCGAC
AGGCCCGAAGGAATAGAAGAAGAAGGTGGAGAGAGAGACAGAGACAGATCCATTCGATTAGTGA
ACGGATCGGCACTGCGTGCGCCAATTCTGCAGACAAATGGCAGTATTCATCCACAATTTTAAAAGA
AAAGGGGGGATTGGGGGGTACAGTGCAGGGGAAAGAATAGTAGACATAATAGCAACAGACATACA
AACTAAAGAATTACAAAAACAAATTACAAAAATTCAAAATTTTCGGGTTTATTACAGGGACAGCAG
AGATCCAGTTTGGTTAATTAAGGTACCAGTGCAAGTGGGTTTTAGGACCAGGATGAGGCGGGGTGG
GGGTGCCTACCTGACGACCGACCCCGACCCACTGGACAAGCACCCAACCCCCATTCCCCAAATTGC
GCATCCCCTATCAGAGAGGGGGAGGGGAAACAGGATGCGGCGAGGCGCGTGCGCACTGCCAGCTT
CAGCACCGCGGACAGTGCCTTCGCCCCCGCCTGGCGGCGCGCGCCACCGCCGCCTCAGCACTGAA
GGCGCGCTGACGTCACTCGCCGGTCCCCCGCAAACTCCCCTTCCCGGCCACCTTGGTCGCGTCCGC
GCCGCCGCCGGCCCAGCCGGACCGCACCACGCGAGGCGCGAGATAGGGGGGCACGGGCGCGACC
ATCTGCGCTGCGGCGCCGGCGACTCAGCGCTGCCTCAGTCTGCGGTGGGCAGCGGAGGAGTCGTG
TCGTGCCTGAGAGCGCAGTCGAGAATCTAGAGCGCTGCCACCATGAAACGGACAGCCGACGGAAGCG
AGTTCGAGTCACCAAAGAAGAAGCGGAAAGTCATCAAGATTGCTACACGGAAATACCTGGGAAAGCAGAA
CGTGTACGACATCGGCGTGGAGCGGGATCACAACTTCGCCCTGAAGAATGGCTTTATCGCCAGCAATTG
CTTCGACTCCGTGGAAATCTCCGGCGTGGAAGATCGGTTCAACGCCTCCCTGGGCACATACC
ACGATCTGCTGAAAATTATCAAGGACAAGGACTTCCTGGACAATGAGGAAAACGAGGACATT
CTGGAAGATATCGTGCTGACCCTGACACTGTTTGAGGACAGAGAGATGATCGAGGAACGGC
TGAAAACCTATGCCCACCTGTTCGACGACAAAGTGATGAAGCAGCTGAAGCGGCGGAGATA
CACCGGCTGGGGCAGGCTGAGCCGGAAGCTGATCAACGGCATCCGGGACAAGCAGTCCGG
CAAGACAATCCTGGATTTCCTGAAGTCCGACGGCTTCGCCAACAGAAACTTCATGCAGCTGA
TCCACGACGACAGCCTGACCTTTAAAGAGGACATCCAGAAAGCCCAGGTGTCCGGCCAGGG
CGATAGCCTGCACGAGCACATTGCCAATCTGGCCGGCAGCCCCGCCATTAAGAAGGGCATCC
TGCAGACAGTGAAGGTGGTGGACGAGCTCGTGAAAGTGATGGGCCGGCACAAGCCCGAGA
ACATCGTGATCGAAATGGCCAGAGAGAACCAGACCACCCAGAAGGGACAGAAGAACAGCCG
CGAGAGAATGAAGCGGATCGAAGAGGGCATCAAAGAGCTGGGCAGCCAGATCCTGAAAGAA
CACCCCGTGGAAAACACCCAGCTGCAGAACGAGAAGCTGTACCTGTACTACCTGCAGAATG
GGCGGGATATGTACGTGGACCAGGAACTGGACATCAACCGGCTGTCCGACTACGATGTGGA
CCATATCGTGCCTCAGAGCTTTCTGAAGGACGACTCCATCGACAACAAGGTGCTGACCAGAA
GCGACAAGAACCGGGGCAAGAGCGACAACGTGCCCTCCGAAGAGGTCGTGAAGAAGATGA
AGAACTACTGGCGGCAGCTGCTGAACGCCAAGCTGATTACCCAGAGAAAGTTCGACAATCTG
ACCAAGGCCGAGAGAGGCGGCCTGAGCGAACTGGATAAGGCCGGCTTCATCAAGAGACAGC
TGGTGGAAACCCGGCAGATCACAAAGCACGTGGCACAGATCCTGGACTCCCGGATGAACAC
TAAGTACGACGAGAATGACAAGCTGATCCGGGAAGTGAAAGTGATCACCCTGAAGTCCAAG
CTGGTGTCCGATTTCCGGAAGGATTTCCAGTTTTACAAAGTGCGCGAGATCAACAACTACCA
CCACGCCCACGACGCCTACCTGAACGCCGTCGTGGGAACCGCCCTGATCAAAAAGTACCCTA
AGCTGGAAAGCGAGTTCGTGTACGGCGACTACAAGGTGTACGACGTGCGGAAGATGATCGC
CAAGAGCGAGCAGGAAATCGGCAAGGCTACCGCCAAGTACTTCTTCTACAGCAACATCATGA
ACTTTTTCAAGACCGAGATTACCCTGGCCAACGGCGAGATCCGGAAGCGGCCTCTGATCGAG
ACAAACGGCGAAACCGGGGAGATCGTGTGGGATAAGGGCCGGGATTTTGCCACCGTGCGGA
AAGTGCTGAGCATGCCCCAAGTGAATATCGTGAAAAAGACCGAGGTGCAGACAGGCGGCTT
CAGCAAAGAGTCTATCCTGCCCAAGAGGAACAGCGATAAGCTGATCGCCAGAAAGAAGGAC
TGGGACCCTAAGAAGTACGGCGGCTTCGACAGCCCCACCGTGGCCTATTCTGTGCTGGTGG
TGGCCAAAGTGGAAAAGGGCAAGTCCAAGAAACTGAAGAGTGTGAAAGAGCTGCTGGGGAT
CACCATCATGGAAAGAAGCAGCTTCGAGAAGAATCCCATCGACTTTCTGGAAGCCAAGGGCT
ACAAAGAAGTGAAAAAGGACCTGATCATCAAGCTGCCTAAGTACTCCCTGTTCGAGCTGGAA
AACGGCCGGAAGAGAATGCTGGCCTCTGCCGGCGAACTGCAGAAGGGAAACGAACTGGCC
CTGCCCTCCAAATATGTGAACTTCCTGTACCTGGCCAGCCACTATGAGAAGCTGAAGGGCTC
CCCCGAGGATAATGAGCAGAAACAGCTGTTTGTGGAACAGCACAAGCACTACCTGGACGAG
ATCATCGAGCAGATCAGCGAGTTCTCCAAGAGAGTGATCCTGGCCGACGCTAATCTGGACAA
AGTGCTGTCCGCCTACAACAAGCACCGGGATAAGCCCATCAGAGAGCAGGCCGAGAATATCA
TCCACCTGTTTACCCTGACCAATCTGGGAGCCCCTGCCGCCTTCAAGTACTTTGACACCACC
ATCGACCGGAAGAGGTACACCAGCACCAAAGAGGTGCTGGACGCCACCCTGATCCACCAGA
GCATCACCGGCCTGTACGAGACACGGATCGACCTGTCTCAGCTGGGAGGTGACTCTGGCGG
CTCAAAAAGAACCGCCGACGGCAGCGAATTCGAGCCCAAGAAGAAGAGGAAAGTCTAAACG
CGTTAAGTCGACAATCAACCTCTGGATTACAAAATTTGTGAAAGATTGACTGGTATTCTTAACTATG
TTGCTCCTTTTACGCTATGTGGATACGCTGCTTTAATGCCTTTGTATCATGCTATTGCTTCCCGTATGG
CTTTCATTTTCTCCTCCTTGTATAAATCCTGGTTGCTGTCTCTTTATGAGGAGTTGTGGCCCGTTGTC
AGGCAACGTGGCGTGGTGTGCACTGTGTTTGCTGACGCAACCCCCACTGGTTGGGGCATTGCCACC
ACCTGTCAGCTCCTTTCCGGGACTTTCGCTTTCCCCCTCCCTATTGCCACGGCGGAACTCATCGCCG
CCTGCCTTGCCCGCTGCTGGACAGGGGCTCGGCTGTTGGGCACTGACAATTCCGTGGTGTTGTCGG
GGAAATCATCGTCCTTTCCTTGGCTGCTCGCCTGTGTTGCCACCTGGATTCTGCGCGGGACGTCCTT
CTGCTACGTCCCTTCGGCCCTCAATCCAGCGGACCTTCCTTCCCGCGGCCTGCTGCCGGCTCTGCG
GCCTCTTCCGCGTCTTCGCCTTCGCCCTCAGACGAGTCGGATCTCCCTTTGGGCCGCCTCCCCGCGT
CGACTTTAAGACCAATGACTTACAAGGCAGCTGTAGATCTTAGCCACTTTTTAAAAGAAAAGGGGG
GACTGGAAGGGCTAATTCACTCCCAACGAAGACAAGATCTGCTTTTTGCTTGTACTGGGTCTCTCT
GGTTAGACCAGATCTGAGCCTGGGAGCTCTCTGGCTAACTAGGGAACCCACTGCTTAAGCCTCAAT
AAAGCTTGCCTTGAGTGCTTCAAGTAGTGTGTGCCCGTCTGTTGTGTGACTCTGGTAACTAGAGAT
CCCTCAGACCCTTTTAGTCAGTGTGGAAAATCTCTAGCAGGGCCCGTTTAAACCCGCTGATCAGCC
TCGACTGTGCCTTCTAGTTGCCAGCCATCTGTTGTTTGCCCCTCCCCCGTGCCTTCCTTGACCCTGG
AAGGTGCCACTCCCACTGTCCTTTCCTAATAAAATGAGGAAATTGCATCGCATTGTCTGAGTAGGTG
TCATTCTATTCTGGGGGGTGGGGTGGGGCAGGACAGCAAGGGGGAGGATTGGGAAGACAATAGCA
GGCATGCTGGGGATGCGGTGGGCTCTATGGCTTCTGAGGCGGAAAGAACCAGCTGGGGCTCTAGG
GGGTATCCCCACGCGCCCTGTAGCGGCGCATTAAGCGCGGCGGGTGTGGTGGTTACGCGCAGCGTG
ACCGCTACACTTGCCAGCGCCCTAGCGCCCGCTCCTTTCGCTTTCTTCCCTTCCTTTCTCGCCACGT
TCGCCGGCTTTCCCCGTCAAGCTCTAAATCGGGGGCTCCCTTTAGGGTTCCGATTTAGTGCTTTACG
GCACCTCGACCCCAAAAAACTTGATTAGGGTGATGGTTCACGTAGTGGGCCATCGCCCTGATAGAC
GGTTTTTCGCCCTTTGACGTTGGAGTCCACGTTCTTTAATAGTGGACTCTTGTTCCAAACTGGAACA
ACACTCAACCCTATCTCGGTCTATTCTTTTGATTTATAAGGGATTTTGCCGATTTCGGCCTATTGGTTA
AAAAATGAGCTGATTTAACAAAAATTTAACGCGAATTAATTCTGTGGAATGTGTGTCAGTTAGGGTG
TGGAAAGTCCCCAGGCTCCCCAGCAGGCAGAAGTATGCAAAGCATGCATCTCAATTAGTCAGCAAC
CAGGTGTGGAAAGTCCCCAGGCTCCCCAGCAGGCAGAAGTATGCAAAGCATGCATCTCAATTAGTC
AGCAACCATAGTCCCGCCCCTAACTCCGCCCATCCCGCCCCTAACTCCGCCCAGTTCCGCCCATTCT
CCGCCCCATGGCTGACTAATTTTTTTTATTTATGCAGAGGCCGAGGCCGCCTCTGCCTCTGAGCTATT
CCAGAAGTAGTGAGGAGGCTTTTTTGGAGGCCTAGGCTTTTGCAAAAAGCTCCCGGGAGCTTGTAT
ATCCATTTTCGGATCTGATCAGCACGTGTTGACAATTAATCATCGGCATAGTATATCGGCATAGTATAA
TACGACAAGGTGAGGAACTAAACCATGGCCAAGTTGACCAGTGCCGTTCCGGTGCTCACCGCGCG
CGACGTCGCCGGAGCGGTCGAGTTCTGGACCGACCGGCTCGGGTTCTCCCGGGACTTCGTGGAGG
ACGACTTCGCCGGTGTGGTCCGGGACGACGTGACCCTGTTCATCAGCGCGGTCCAGGACCAGGTG
GTGCCGGACAACACCCTGGCCTGGGTGTGGGTGCGCGGCCTGGACGAGCTGTACGCCGAGTGGTC
GGAGGTCGTGTCCACGAACTTCCGGGACGCCTCCGGGCCGGCCATGACCGAGATCGGCGAGCAGC
CGTGGGGGCGGGAGTTCGCCCTGCGCGACCCGGCCGGCAACTGCGTGCACTTCGTGGCCGAGGAG
CAGGACTGACACGTGCTACGAGATTTCGATTCCACCGCCGCCTTCTATGAAAGGTTGGGCTTCGGA
ATCGTTTTCCGGGACGCCGGCTGGATGATCCTCCAGCGCGGGGATCTCATGCTGGAGTTCTTCGCCC
ACCCCAACTTGTTTATTGCAGCTTATAATGGTTACAAATAAAGCAATAGCATCACAAATTTCACAAAT
AAAGCATTTTTTTCACTGCATTCTAGTTGTGGTTTGTCCAAACTCATCAATGTATCTTATCATGTCTGT
ATACCGTCGACCTCTAGCTAGAGCTTGGCGTAATCATGGTCATAGCTGTTTCCTGTGTGAAATTGTTA
TCCGCTCACAATTCCACACAACATACGAGCCGGAAGCATAAAGTGTAAAGCCTGGGGTGCCTAATG
AGTGAGCTAACTCACATTAATTGCGTTGCGCTCACTGCCCGCTTTCCAGTCGGGAAACCTGTCGTG
CCAGCTGCATTAATGAATCGGCCAACGCGCGGGGAGAGGCGGTTTGCGTATTGGGCGCTCTTCCGC
TTCCTCGCTCACTGACTCGCTGCGCTCGGTCGTTCGGCTGCGGCGAGCGGTATCAGCTCACTCAAA
GGCGGTAATACGGTTATCCACAGAATCAGGGGATAACGCAGGAAAGAACATGTGAGCAAAAGGCC
AGCAAAAGGCCAGGAACCGTAAAAAGGCCGCGTTGCTGGCGTTTTTCCATAGGCTCCGCCCCCCT
GACGAGCATCACAAAAATCGACGCTCAAGTCAGAGGTGGCGAAACCCGACAGGACTATAAAGATA
CCAGGCGTTTCCCCCTGGAAGCTCCCTCGTGCGCTCTCCTGTTCCGACCCTGCCGCTTACCGGATAC
CTGTCCGCCTTTCTCCCTTCGGGAAGCGTGGCGCTTTCTCATAGCTCACGCTGTAGGTATCTCAGTT
CGGTGTAGGTCGTTCGCTCCAAGCTGGGCTGTGTGCACGAACCCCCCGTTCAGCCCGACCGCTGCG
CCTTATCCGGTAACTATCGTCTTGAGTCCAACCCGGTAAGACACGACTTATCGCCACTGGCAGCAGC
CACTGGTAACAGGATTAGCAGAGCGAGGTATGTAGGCGGTGCTACAGAGTTCTTGAAGTGGTGGCC
TAACTACGGCTACACTAGAAGAACAGTATTTGGTATCTGCGCTCTGCTGAAGCCAGTTACCTTCGGA
AAAAGAGTTGGTAGCTCTTGATCCGGCAAACAAACCACCGCTGGTAGCGGTGGTTTTTTTGTTTGC
AAGCAGCAGATTACGCGCAGAAAAAAAGGATCTCAAGAAGATCCTTTGATCTTTTCTACGGGGTCT
GACGCTCAGTGGAACGAAAACTCACGTTAAGGGATTTTGGTCATGAGATTATCAAAAAGGATCTTC
ACCTAGATCCTTTTAAATTAAAAATGAAGTTTTAAATCAATCTAAAGTATATATGAGTAAACTTGGTC
TGACAGTTACCAATGCTTAATCAGTGAGGCACCTATCTCAGCGATCTGTCTATTTCGTTCATCCATAG
TTGCCTGACTCCCCGTCGTGTAGATAACTACGATACGGGAGGGCTTACCATCTGGCCCCAGTGCTGC
AATGATACCGCGAGACCCACGCTCACCGGCTCCAGATTTATCAGCAATAAACCAGCCAGCCGGAAG
GGCCGAGCGCAGAAGTGGTCCTGCAACTTTATCCGCCTCCATCCAGTCTATTAATTGTTGCCGGGAA
GCTAGAGTAAGTAGTTCGCCAGTTAATAGTTTGCGCAACGTTGTTGCCATTGCTACAGGCATCGTGG
TGTCACGCTCGTCGTTTGGTATGGCTTCATTCAGCTCCGGTTCCCAACGATCAAGGCGAGTTACATG
ATCCCCCATGTTGTGCAAAAAAGCGGTTAGCTCCTTCGGTCCTCCGATCGTTGTCAGAAGTAAGTTG
GCCGCAGTGTTATCACTCATGGTTATGGCAGCACTGCATAATTCTCTTACTGTCATGCCATCCGTAAG
ATGCTTTTCTGTGACTGGTGAGTACTCAACCAAGTCATTCTGAGAATAGTGTATGCGGCGACCGAGT
TGCTCTTGCCCGGCGTCAATACGGGATAATACCGCGCCACATAGCAGAACTTTAAAAGTGCTCATCA
TTGGAAAACGTTCTTCGGGGCGAAAACTCTCAAGGATCTTACCGCTGTTGAGATCCAGTTCGATGT
AACCCACTCGTGCACCCAACTGATCTTCAGCATCTTTTACTTTCACCAGCGTTTCTGGGTGAGCAAA
AACAGGAAGGCAAAATGCCGCAAAAAAGGGAATAAGGGCGACACGGAAATGTTGAATACTCATAC
TCTTCCTTTTTCAATATTATTGAAGCATTTATCAGGGTTATTGTCTCATGAGCGGATACATATTTGAA
TGTATTTAGAAAAATAAACAAATAGGGGTTCCGCGCACATTTCCCCGAAAAGTGCCACCTGAC
hSynpromoter
C-termNpu
C-termwtCas9
pLenti-U6-DNMT1_nicking_sgRNA:
(SEQ ID NO: 738)
TAACAAATTGGCTGTGGTATATAAAATTATTCATAATGATAGTAGGAGGCTTGGTAGGTTTAAGAATA
GTTTTTGCTGTACTTTCTATAGTGAATAGAGTTAGGCAGGGATATTCACCATTATCGTTTCAGACCCA
CCTCCCAACCCCGAGGGGACCCAGAGAGGGCCTATTTCCCATGATTCCTTCATATTTGCATATACGATAC
AAGGCTGTTAGAGAGATAATTAGAATTAATTTGACTGTAAACACAAAGATATTAGTACAAAATACGTGACGTA
GAAAGTAATAATTTCTTGGGTAGTTTGCAGTTTTAAAATTATGTTTTAAAATGGACTATCATATGCTTACCGTA
ACTTGAAAGTATTTCGATTTCTTGGCTTTATATATCTTGTGGAAAGGACGAAACACC

[symbol]

[symbol]

[symbol]

[symbol]

[symbol]

TTTTTTAAGCTTGGCGTAACTAGATCTTGAGACAAATGGCAGTATTCATCCA
CAATTTTAAAAGAAAAGGGGGGATTGGGGGGTACAGTGCAGGGGAAAGAATAGTAGACATAATAG
CAACAGACATACAAACTAAAGAATTACAAAAACAAATTACAAAAATTCAAAATTTTCGGGTTTATTA
CAGGGACAGCAGAGATCCACTTTGGCGCCGGCTCGAGGGGGCCCGGGTGCAAAGATGGATAAAGT
TTTAAACAGAGAGGAATCTTTGCAGCTAATGGACCTTCTAGGTCTTGAAAGGAGTGGGAATTGGCT
CCGGTGCCCGTCAGTGGGCAGAGCGCACATCGCCCACAGTCCCCGAGAAGTTGGGGGGAGGGGTC
GGCAATTGATCCGGTGCCTAGAGAAGGTGGCGCGGGGTAAACTGGGAAAGTGATGTCGTGTACTG
GCTCCGCCTTTTTCCCGAGGGTGGGGGAGAACCGTATATAAGTGCAGTAGTCGCCGTGAACGTTCT
TTTTCGCAACGGGTTTGCCGCCAGAACACAGGTAAGTGCCGTGTGTGGTTCCCGCGGGCCTGGCCT
CTTTACGGGTTATGGCCCTTGCGTGCCTTGAATTACTTCCACCTGGCTGCAGTACGTGATTCTTGATC
CCGAGCTTCGGGTTGGAAGTGGGTGGGAGAGTTCGAGGCCTTGCGCTTAAGGAGCCCCTTCGCCT
CGTGCTTGAGTTGAGGCCTGGCCTGGGCGCTGGGGCCGCCGCGTGCGAATCTGGTGGCACCTTCG
CGCCTGTCTCGCTGCTTTCGATAAGTCTCTAGCCATTTAAAATTTTTGATGACCTGCTGCGACGCTTT
TTTTCTGGCAAGATAGTCTTGTAAATGCGGGCCAAGATCTGCACACTGGTATTTCGGTTTTTGGGGC
CGCGGGCGGCGACGGGGCCCGTGCGTCCCAGCGCACATGTTCGGCGAGGCGGGGCCTGCGAGCG
CGGCCACCGAGAATCGGACGGGGGTAGTCTCAAGCTGGCCGGCCTGCTCTGGTGCCTGGCCTCGC
GCCGCCGTGTATCGCCCCGCCCTGGGCGGCAAGGCTGGCCCGGTCGGCACCAGTTGCGTGAGCGG
AAAGATGGCCGCTTCCCGGCCCTGCTGCAGGGAGCTCAAAATGGAGGACGCGGCGCTCGGGAGAG
CGGGCGGGTGAGTCACCCACACAAAGGAAAAGGGCCTTTCCGTCCTCAGCCGTCGCTTCATGTGA
CTCCACGGAGTACCGGGCGCCGTCCAGGCACCTCGATTAGTTCTCGAGCTTTTGGAGTACGTCGTC
TTTAGGTTGGGGGGAGGGGTTTTATGCGATGGAGTTTCCCCACACTGAGTGGGTGGAGACTGAAGT
TAGGCCAGCTTGGCACTTGATGTAATTCTCCTTGGAATTTGCCCTTTTTGAGTTTGGATCTTGGTTCA
TTCTCAAGCCTCAGACAGTGGTTCAAAGTTTTTTTCTTCCATTTCAGGTGTCGTGACGTACGGCCAC
CATGACCGAGTACAAGCCCACGGTGCGCCTCGCCACCCGCGACGACGTCCCCAGGGCCGTACGCA
CCCTCGCCGCCGCGTTCGCCGACTACCCCGCCACGCGCCACACCGTCGATCCGGACCGCCACATCG
AGCGGGTCACCGAGCTGCAAGAACTCTTCCTCACGCGCGTCGGGCTCGACATCGGCAAGGTGTGG
GTCGCGGACGACGGCGCCGCCGTGGCGGTCTGGACCACGCCGGAGAGCGTCGAAGCGGGGGCGG
TGTTCGCCGAGATCGGCCCGCGCATGGCCGAGTTGAGCGGTTCCCGGCTGGCCGCGCAGCAACAG
ATGGAAGGCCTCCTGGCGCCGCACCGGCCCAAGGAGCCCGCGTGGTTCCTGGCCACCGTCGGAGT
CTCGCCCGACCACCAGGGCAAGGGTCTGGGCAGCGCCGTCGTGCTCCCCGGAGTGGAGGCGGCCG
AGCGCGCCGGGGTGCCCGCCTTCCTGGAGACCTCCGCGCCCCGCAACCTCCCCTTCTACGAGCGG
CTCGGCTTCACCGTCACCGCCGACGTCGAGGTGCCCGAAGGACCGCGCACCTGGTGCATGACCCG
CAAGCCCGGTGCCTGAACGCGTTAAGTCGACAATCAACCTCTGGATTACAAAATTTGTGAAAGATT
GACTGGTATTCTTAACTATGTTGCTCCTTTTACGCTATGTGGATACGCTGCTTTAATGCCTTTGTATCA
TGCTATTGCTTCCCGTATGGCTTTCATTTTCTCCTCCTTGTATAAATCCTGGTTGCTGTCTCTTTATGA
GGAGTTGTGGCCCGTTGTCAGGCAACGTGGCGTGGTGTGCACTGTGTTTGCTGACGCAACCCCCA
CTGGTTGGGGCATTGCCACCACCTGTCAGCTCCTTTCCGGGACTTTCGCTTTCCCCCTCCCTATTGC
CACGGCGGAACTCATCGCCGCCTGCCTTGCCCGCTGCTGGACAGGGGCTCGGCTGTTGGGCACTG
ACAATTCCGTGGTGTTGTCGGGGAAATCATCGTCCTTTCCTTGGCTGCTCGCCTGTGTTGCCACCTG
GATTCTGCGCGGGACGTCCTTCTGCTACGTCCCTTCGGCCCTCAATCCAGCGGACCTTCCTTCCCGC
GGCCTGCTGCCGGCTCTGCGGCCTCTTCCGCGTCTTCGCCTTCGCCCTCAGACGAGTCGGATCTCC
CTTTGGGCCGCCTCCCCGCGTCGACTTTAAGACCAATGACTTACAAGGCAGCTGTAGATCTTAGCC
ACTTTTTAAAAGAAAAGGGGGGACTGGAAGGGCTAATTCACTCCCAACGAAGACAAGATCTGCTT
TTTGCTTGTACTGGGTCTCTCTGGTTAGACCAGATCTGAGCCTGGGAGCTCTCTGGCTAACTAGGGA
ACCCACTGCTTAAGCCTCAATAAAGCTTGCCTTGAGTGCTTCAAGTAGTGTGTGCCCGTCTGTTGTG
TGACTCTGGTAACTAGAGATCCCTCAGACCCTTTTAGTCAGTGTGGAAAATCTCTAGCAGTACGTAT
AGTAGTTCATGTCATCTTATTATTCAGTATTTATAACTTGCAAAGAAATGAATATCAGAGAGTGAGAG
GAACTTGTTTATTGCAGCTTATAATGGTTACAAATAAAGCAATAGCATCACAAATTTCACAAATAAA
GCATTTTTTTCACTGCATTCTAGTTGTGGTTTGTCCAAACTCATCAATGTATCTTATCATGTCTGGCTC
TAGCTATCCCGCCCCTAACTCCGCCCATCCCGCCCCTAACTCCGCCCAGTTCCGCCCATTCTCCGCC
CCATGGCTGACTAATTTTTTTTATTTATGCAGAGGCCGAGGCCGCCTCGGCCTCTGAGCTATTCCAG
AAGTAGTGAGGAGGCTTTTTTGGAGGCCTAGGGACGTACCCAATTCGCCCTATAGTGAGTCGTATTA
CGCGCGCTCACTGGCCGTCGTTTTACAACGTCGTGACTGGGAAAACCCTGGCGTTACCCAACTTAA
TCGCCTTGCAGCACATCCCCCTTTCGCCAGCTGGCGTAATAGCGAAGAGGCCCGCACCGATCGCCC
TTCCCAACAGTTGCGCAGCCTGAATGGCGAATGGGACGCGCCCTGTAGCGGCGCATTAAGCGCGGC
GGGTGTGGTGGTTACGCGCAGCGTGACCGCTACACTTGCCAGCGCCCTAGCGCCCGCTCCTTTCGC
TTTCTTCCCTTCCTTTCTCGCCACGTTCGCCGGCTTTCCCCGTCAAGCTCTAAATCGGGGGCTCCCT
TTAGGGTTCCGATTTAGTGCTTTACGGCACCTCGACCCCAAAAAACTTGATTAGGGTGATGGTTCAC
GTAGTGGGCCATCGCCCTGATAGACGGTTTTTCGCCCTTTGACGTTGGAGTCCACGTTCTTTAATAG
TGGACTCTTGTTCCAAACTGGAACAACACTCAACCCTATCTCGGTCTATTCTTTTGATTTATAAGGG
ATTTTGCCGATTTCGGCCTATTGGTTAAAAAATGAGCTGATTTAACAAAAATTTAACGCGAATTTTAA
CAAAATATTAACGCTTACAATTTAGGTGGCACTTTTCGGGGAAATGTGCGCGGAACCCCTATTTGTT
TATTTTTCTAAATACATTCAAATATGTATCCGCTCATGAGACAATAACCCTGATAAATGCTTCAATAAT
ATTGAAAAAGGAAGAGTATGAGTATTCAACATTTCCGTGTCGCCCTTATTCCCTTTTTTGCGGCATTT
TGCCTTCCTGTTTTTGCTCACCCAGAAACGCTGGTGAAAGTAAAAGATGCTGAAGATCAGTTGGGT
GCACGAGTGGGTTACATCGAACTGGATCTCAACAGCGGTAAGATCCTTGAGAGTTTTCGCCCCGAA
GAACGTTTTCCAATGATGAGCACTTTTAAAGTTCTGCTATGTGGCGCGGTATTATCCCGTATTGACGC
CGGGCAAGAGCAACTCGGTCGCCGCATACACTATTCTCAGAATGACTTGGTTGAGTACTCACCAGT
CACAGAAAAGCATCTTACGGATGGCATGACAGTAAGAGAATTATGCAGTGCTGCCATAACCATGAG
TGATAACACTGCGGCCAACTTACTTCTGACAACGATCGGAGGACCGAAGGAGCTAACCGCTTTTTT
GCACAACATGGGGGATCATGTAACTCGCCTTGATCGTTGGGAACCGGAGCTGAATGAAGCCATACC
AAACGACGAGCGTGACACCACGATGCCTGTAGCAATGGCAACAACGTTGCGCAAACTATTAACTG
GCGAACTACTTACTCTAGCTTCCCGGCAACAATTAATAGACTGGATGGAGGCGGATAAAGTTGCAG
GACCACTTCTGCGCTCGGCCCTTCCGGCTGGCTGGTTTATTGCTGATAAATCTGGAGCCGGTGAGCG
TGGGTCTCGCGGTATCATTGCAGCACTGGGGCCAGATGGTAAGCCCTCCCGTATCGTAGTTATCTAC
ACGACGGGGAGTCAGGCAACTATGGATGAACGAAATAGACAGATCGCTGAGATAGGTGCCTCACT
GATTAAGCATTGGTAACTGTCAGACCAAGTTTACTCATATATACTTTAGATTGATTTAAAACTTCATTT
TTAATTTAAAAGGATCTAGGTGAAGATCCTTTTTGATAATCTCATGACCAAAATCCCTTAACGTGAGT
TTTCGTTCCACTGAGCGTCAGACCCCGTAGAAAAGATCAAAGGATCTTCTTGAGATCCTTTTTTTCT
GCGCGTAATCTGCTGCTTGCAAACAAAAAAACCACCGCTACCAGCGGTGGTTTGTTTGCCGGATCA
AGAGCTACCAACTCTTTTTCCGAAGGTAACTGGCTTCAGCAGAGCGCAGATACCAAATACTGTTCT
TCTAGTGTAGCCGTAGTTAGGCCACCACTTCAAGAACTCTGTAGCACCGCCTACATACCTCGCTCTG
CTAATCCTGTTACCAGTGGCTGCTGCCAGTGGCGATAAGTCGTGTCTTACCGGGTTGGACTCAAGA
CGATAGTTACCGGATAAGGCGCAGCGGTCGGGCTGAACGGGGGGTTCGTGCACACAGCCCAGCTT
GGAGCGAACGACCTACACCGAACTGAGATACCTACAGCGTGAGCTATGAGAAAGCGCCACGCTTC
CCGAAGGGAGAAAGGCGGACAGGTATCCGGTAAGCGGCAGGGTCGGAACAGGAGAGCGCACGAG
GGAGCTTCCAGGGGGAAACGCCTGGTATCTTTATAGTCCTGTCGGGTTTCGCCACCTCTGACTTGA
GCGTCGATTTTTGTGATGCTCGTCAGGGGGGCGGAGCCTATGGAAAAACGCCAGCAACGCGGCCTT
TTTACGGTTCCTGGCCTTTTGCTGGCCTTTTGCTCACATGTTCTTTCCTGCGTTATCCCCTGATTCTGT
GGATAACCGTATTACCGCCTTTGAGTGAGCTGATACCGCTCGCCGCAGCCGAACGACCGAGCGCAG
CGAGTCAGTGAGCGAGGAAGCGGAAGAGCGCCCAATACGCAAACCGCCTCTCCCCGCGCGTTGGC
CGATTCATTAATGCAGCTGGCACGACAGGTTTCCCGACTGGAAAGCGGGCAGTGAGCGCAACGCA
ATTAATGTGAGTTAGCTCACTCATTAGGCACCCCAGGCTTTACACTTTATGCTTCCGGCTCGTATGTT
GTGTGGAATTGTGAGCGGATAACAATTTCACACAGGAAACAGCTATGACCATGATTACGCCAAGCG
CGCAATTAACCCTCACTAAAGGGAACAAAAGCTGGAGCTGCAAGCTTAATGTAGTCTTATGCAATA
CTCTTGTAGTCTTGCAACATGGTAACGATGAGTTAGCAACATGCCTTACAAGGAGAGAAAAAGCAC
CGTGCATGCCGATTGGTGGAAGTAAGGTGGTACGATCGTGCCTTATTAGGAAGGCAACAGACGGGT
CTGACATGGATTGGACGAACCACTGAATTGCCGCATTGCAGAGATATTGTATTTAAGTGCCTAGCTC
GATACATAAACGGGTCTCTCTGGTTAGACCAGATCTGAGCCTGGGAGCTCTCTGGCTAACTAGGGA
ACCCACTGCTTAAGCCTCAATAAAGCTTGCCTTGAGTGCTTCAAGTAGTGTGTGCCCGTCTGTTGTG
TGACTCTGGTAACTAGAGATCCCTCAGACCCTTTTAGTCAGTGTGGAAAATCTCTAGCAGTGGCGC
CCGAACAGGGACTTGAAAGCGAAAGGGAAACCAGAGGAGCTCTCTCGACGCAGGACTCGGCTTG
CTGAAGCGCGCACGGCAAGAGGCGAGGGGCGGCGACTGGTGAGTACGCCAAAAATTTTGACTAGC
GGAGGCTAGAAGGAGAGAGATGGGTGCGAGAGCGTCAGTATTAAGCGGGGGAGAATTAGATCGCG
ATGGGAAAAAATTCGGTTAAGGCCAGGGGGAAAGAAAAAATATAAATTAAAACATATAGTATGGGC
AAGCAGGGAGCTAGAACGATTCGCAGTTAATCCTGGCCTGTTAGAAACATCAGAAGGCTGTAGACA
AATACTGGGACAGCTACAACCATCCCTTCAGACAGGATCAGAAGAACTTAGATCATTATATAATACA
GTAGCAACCCTCTATTGTGTGCATCAAAGGATAGAGATAAAAGACACCAAGGAAGCTTTAGACAAG
ATAGAGGAAGAGCAAAACAAAAGTAAGACCACCGCACAGCAAGCGGCCGCTGATCTTCAGACCTG
GAGGAGGAGATATGAGGGACAATTGGAGAAGTGAATTATATAAATATAAAGTAGTAAAAATTGAAC
CATTAGGAGTAGCACCCACCAAGGCAAAGAGAAGAGTGGTGCAGAGAGAAAAAAGAGCAGTGGG
AATAGGAGCTTTGTTCCTTGGGTTCTTGGGAGCAGCAGGAAGCACTATGGGCGCAGCGTCAATGAC
GCTGACGGTACAGGCCAGACAATTATTGTCTGGTATAGTGCAGCAGCAGAACAATTTGCTGAGGGC
TATTGAGGCGCAACAGCATCTGTTGCAACTCACAGTCTGGGGCATCAAGCAGCTCCAGGCAAGAAT
CCTGGCTGTGGAAAGATACCTAAAGGATCAACAGCTCCTGGGGATTTGGGGTTGCTCTGGAAAACT
CATTTGCACCACTGCTGTGCCTTGGAATGCTAGTTGGAGTAATAAATCTCTGGAACAGATTTGGAAT
CACACGACCTGGATGGAGTGGGACAGAGAAATTAACAATTACACAAGCTTAATACACTCCTTAATT
GAAGAATCGCAAAACCAGCAAGAAAAGAATGAACAAGAATTATTGGAATTAGATAAATGGGCAA
GTTTGTGGAATTGGTTTAACA
U6promoter

[symbol]

[1664] Amino acid sequences of Maloney murine leukemia virus reverse transcriptase (M-MLV RT) variants used herein.

PE1 M-MLV RT:
(SEQ ID NO: 739)
TLNIEDEYRLHETSKEPDVSLGSTWLSDFPQAWAETGGMGLAVRQAPLIIPLKATSTPVSIKQYPM
SQEARLGIKPHIQRLLDQGILVPCQSPWNTPLLPVKKPGTNDYRPVQDLREVNKRVEDIHPTVPNP
YNLLSGLPPSHQWYTVLDLKDAFFCLRLHPTSQPLFAFEWRDPEMGISGQLTWTRLPQGFKNSPT
LFDEALHRDLADFRIQHPDLILLQYVDDLLLAATSELDCQQGTRALLQTLGNLGYRASAKKAQIC
QKQVKYLGYLLKEGQRWLTEARKETVMGQPTPKTPRQLREFLGTAGFCRLWIPGFAEMAAPLYP
LTKTGTLFNWGPDQQKAYQEIKQALLTAPALGLPDLTKPFELFVDEKQGYAKGVLTQKLGPWRRP
VAYLSKKLDPVAAGWPPCLRMVAAIAVLTKDAGKLTMGQPLVILAPHAVEALVKQPPDRWLSNA
RMTHYQALLLDTDRVQFGPVVALNPATLLPLPEEGLQHNCLDILAEAHGTRPDLTDQPLPDADHT
WYTDGSSLLQEGQRKAGAAVTTETEVIWAKALPAGTSAQRAELIALTQALKMAEGKKLNVYTD
SRYAFATAHIHGEIYRRRGLLTSEGKEIKNKDEILALLKALFLPKRLSIIHCPGHQKGHSAEARGNR
MADQAARKAAITETPDTSTLLIENSSP
M3 M-MLV RT (D200N, T330P, L603W)(see Baranauskas et al.¹⁸²):
(SEQ ID NO: 740)
TLNIEDEYRLHETSKEPDVSLGSTWLSDFPQAWAETGGMGLAVRQAPLIIPLKATSTPVSIKQYPM
SQEARLGIKPHIQRLLDQGILVPCQSPWNTPLLPVKKPGTNDYRPVQDLREVNKRVEDIHPTVPNP
YNLLSGLPPSHQWYTVLDLKDAFFCLRLHPTSQPLFAFEWRDPEMGISGQLTWTRLPQGFKNSPT
LFNEALHRDLADFRIQHPDLILLQYVDDLLLAATSELDCQQGTRALLQTLGNLGYRASAKKAQIC
QKQVKYLGYLLKEGQRWLTEARKETVMGQPTPKTPRQLREFLGTAGFCRLWIPGFAEMAAPLYP
LTKPGTLFNWGPDQQKAYQEIKQALLTAPALGLPDLTKPFELFVDEKQGYAKGVLTQKLGPWRRP
VAYLSKKLDPVAAGWPPCLRMVAAIAVLTKDAGKLTMGQPLVILAPHAVEALVKQPPDRWLSNA
RMTHYQALLLDTDRVQFGPVVALNPATLLPLPEEGLQHNCLDILAEAHGTRPDLTDQPLPDADHT
WYTDGSSLLQEGQRKAGAAVTTETEVIWAKALPAGTSAQRAELIALTQALKMAEGKKLNVYTD
SRYAFATAHIHGEIYRRRGWLTSEGKEIKNKDEILALLKALFLPKRLSIIHCPGHQKGHSAEARGNR
MADQAARKAAITETPDTSTLLIENSSP
PE2 M-MLVRT (D200N, T306K, W313F, T330P, L603W):
(SEQ ID NO: 741)
TLNIEDEYRLHETSKEPDVSLGSTWLSDFPQAWAETGGMGLAVRQAPLIIPLKATSTPVSIKQYPM
SQEARLGIKPHIQRLLDQGILVPCQSPWNTPLLPVKKPGTNDYRPVQDLREVNKRVEDIHPTVPNP
YNLLSGLPPSHQWYTVLDLKDAFFCLRLHPTSQPLFAFEWRDPEMGISGQLTWTRLPQGFKNSPT
LFNEALHRDLADFRIQHPDLILLQYVDDLLLAATSELDCQQGTRALLQTLGNLGYRASAKKAQIC
QKQVKYLGYLLKEGQRWLTEARKETVMGQPTPKTPRQLREFLGKAGFCRLFIPGFAEMAAPLYP
LTKPGTLFNWGPDQQKAYQEIKQALLTAPALGLPDLTKPFELFVDEKQGYAKGVLTQKLGPWRRP
VAYLSKKLDPVAAGWPPCLRMVAAIAVLTKDAGKLTMGQPLVILAPHAVEALVKQPPDRWLSNA
RMTHYQALLLDTDRVQFGPVVALNPATLLPLPEEGLQHNCLDILAEAHGTRPDLTDQPLPDADHT
WYTDGSSLLQEGQRKAGAAVTTETEVIWAKALPAGTSAQRAELIALTQALKMAEGKKLNVYTD
SRYAFATAHIHGEIYRRRGWLTSEGKEIKNKDEILALLKALFLPKRLSIIHCPGHQKGHSAEARGNR
MADQAARKAAITETPDTSTLLIENSSP
M3-deadRT M-MLV RT:
(SEQ ID NO: 742)
TLNIEDEYRLHETSKEPDVSLGSTWLSDFPQAWAETGGMGLAVRQAPLIIPLKATSTPVSIKQYPM
SQEARLGIKPHIQRLLDQGILVPCQSPWNTPLLPVKLPGTNDYSPVQDLREVNKRVEDIHPTVPNP
YNLLSGLPPSHQWYTVLDLKDAFFCLRLHPTSQPLFAFEWRDPEMGISGQLTWTRLPQGFKNSPT
LFNEALHRDLADFRIQHPDLILLQYVDDLLLAATSELDCQQGTRALLQTLGNLGYRASAKKAQIC
QKQVKYLGYLLKEGQRWLTEARKETVMGQPTPKTPRQLREFLGTAGFCRLWIPGFAEMAAPLYP
LTKPGTLFNWGPDQQKAYQEIKQALLTAPALGLPDLTKPFELFVDEKQGYAKGVLTQKLGPWRRP
VAYLSKKLDPVAAGWPPCLRMVAAIAVLTKDAGKLTMGQPLVILAPHAVEALVKQPPDRWLSNA
RMTHYQALLLDTDRVQFGPVVALNPATLLPLPEEGLQHNCLDILAEAHGTRPDLTDQPLPDADHT
WYTDGSSLLQEGQRKAGAAVTTETEVIWAKALPAGTSAQRAELIALTQALKMAEGKKLNVYTD
SRYAFATAHIHGEIYRRRGWLTSEGKEIKNKDEILALLKALFLPKRLSIIHCPGHQKGHSAEARGNR
MADQAARKAAITETPDTSTLLIENSSP

### REFERENCES FOR EXAMPLE 2

[1665] Each of the following references are cited in Example 12, each of which are incorporated herein by reference.
[1666] 1. Landrum, M. J. et al. ClinVar: public archive of interpretations of clinically relevant variants. Nucleic Acids Res. 44, D862—D868 (2016).
[1667] 2. Jinek, M. et al. A Programmable Dual-RNA-Guided DNA Endonuclease in Adaptive Bacterial Immunity. Science 337, 816-821 (2012).
[1668] 3. Cong, L. et al. Multiplex Genome Engineering Using CRISPR/Cas Systems. Science 339, 819—823 (2013).
[1669] 4. Mali, P. et al. RNA-Guided Human Genome Engineering via Cas9. Science 339, 823-826 (2013).
[1670] 5. Yang, H. et al. One-Step Generation of Mice Carrying Reporter and Conditional Alleles by CRISPR/Cas-Mediated Genome Engineering. Cell 154, 1370-1379 (2013).
[1671] 6. Kim, S., Kim, D., Cho, S. W., Kim, J. & Kim, J.-S. Highly efficient RNA-guided genome editing in human cells via delivery of purified Cas9 ribonucleoproteins. Genome Res. 24, 1012-1019 (2014).
[1672] 7. Orlando, S. J. et al. Zinc-finger nuclease-driven targeted integration into mammalian genomes using donors with limited chromosomal homology. Nucleic Acids Res. 38, e152—e152 (2010).
[1673] 8. Tsai, S. Q. et al. GUIDE-seq enables genome-wide profiling of off-target cleavage by CRISPRCas nucleases. Nat. Biotechnol. 33, 187-197 (2015).
[1674] 9. Suzuki, K. et al. In vivo genome editing via CRISPR/Cas9 mediated homology-independent targeted integration. Nature 540, 144-149 (2016).
[1675] 10. Kosicki, M., Tomberg, K. & Bradley, A. Repair of double-strand breaks induced by CRISPR—Cas9 leads to large deletions and complex rearrangements. Nat. Biotechnol. 36, 765-771 (2018).
[1676] 11. Haapaniemi, E., Botla, S., Persson, J., Schmierer, B. & Taipale, J. CRISPR—Cas9 genome editing induces a p53-mediated DNA damage response. Nat. Med. 24, 927-930 (2018).
[1677] 12. Ihry, R. J. et al. p53 inhibits CRISPR—Cas9 engineering in human pluripotent stem cells. Nat. Med. 24, 939-946 (2018).
[1678] 13. Rouet, P., Smih, F. & Jasin, M. Expression of a site-specific endonuclease stimulates homologous recombination in mammalian cells. Proc. Natl. Acad. Sci. 91, 6064-6068 (1994).
[1679] 14. Chapman, J. R., Taylor, M. R. G. & Boulton, S. J. Playing the end game: DNA double-strand break repair pathway choice. Mol. Cell 47, 497-510 (2012).
[1680] 15. Cox, D. B. T., Platt, R. J. & Zhang, F. Therapeutic genome editing: prospects and challenges. Nat. Med. 21, 121-131 (2015).
[1681] 16. Paquet, D. et al. Efficient introduction of specific homozygous and heterozygous mutations using CRISPR/Cas9. Nature 533, 125-129 (2016).
[1682] 17. Chu, V. T. et al. Increasing the efficiency of homology-directed repair for CRISPR-Cas9-induced precise gene editing in mammalian cells. Nat. Biotechnol. 33,543-548 (2015).
[1683] 18. Maruyama, T. et al. Increasing the efficiency of precise genome editing with CRISPR-Cas9 by inhibition of nonhomologous end joining. Nat. Biotechnol. 33,538-542 (2015).
[1684] 19. Rees, H. A., Yeh, W.-H. & Liu, D. R. Development of hRad51—Cas9 nickase fusions that mediate HDR without double-stranded breaks. Nat. Commun. 10, 1-12 (2019).
[1685] 20. Shen, M. W. et al. Predictable and precise template-free CRISPR editing of pathogenic variants. Nature 563, 646-651 (2018).
[1686] 21. Rees, H. A. & Liu, D. R. Base editing: precision chemistry on the genome and transcriptome of living cells. Nat. Rev. Genet. 19, 770 (2018).
[1687] 22. Komor, A. C., Kim, Y. B., Packer, M. S., Zuris, J. A. & Liu, D. R. Programmable editing of a target base in genomic DNA without double-stranded DNA cleavage. Nature 533, 420-424 (2016).
[1688] 23. Gaudelli, N. M. et al. Programmable base editing of AT to GC in genomic DNA without DNA cleavage. Nature 551,464-471 (2017).
[1689] 24. Gao, X. et al. Treatment of autosomal dominant hearing loss by in vivo delivery of genome editing agents. Nature 553,217-221 (2018).
[1690] 25. Ingram, V. M. A specific chemical difference between the globins of normal human and sickle-cell anaemia haemoglobin. Nature 178, 792-794 (1956).
[1691] 26. Myerowitz, R. & Costigan, F. C. The major defect in Ashkenazi Jews with Tay-Sachs disease is an insertion in the gene for the alpha-chain of beta-hexosaminidase. J. Biol. Chem. 263, 18587-18589 (1988).
[1692] 27. Zielenski, J. Genotype and Phenotype in Cystic Fibrosis. Respiration 67, 117-133 (2000).
[1693] 28. Mead, S. et al. A Novel Protective Prion Protein Variant that Colocalizes with Kuru Exposure. N. Engl. J. Med. 361, 2056-2065 (2009).
[1694] 29. Marraffini, L. A. & Sontheimer, E. J. CRISPR interference limits horizontal gene transfer in staphylococci by targeting DNA. Science 322, 1843-1845 (2008).
[1695] 30. Barrangou, R. et al. CRISPR provides acquired resistance against viruses in prokaryotes. Science 315, 1709-1712 (2007).
[1696] 31. Jiang, F. & Doudna, J. A. CRISPR—Cas9 Structures and Mechanisms. Annu. Rev. Biophys. 46, 505-529 (2017).
[1697] 32. Hille, F. et al. The Biology of CRISPR-Cas: Backward and Forward. Cell 172, 1239-1259 (2018).
[1698] 33. Luan, D. D., Korman, M. H., Jakubczak, J. L. & Eickbush, T. H. Reverse transcription of R2Bm RNA is primed by a nick at the chromosomal target site: a mechanism for non-LTR retrotransposition. Cell 72, 595-605 (1993).
[1699] 34. Liu, Y., Kao, H.-I. & Bambara, R. A. Flap endonuclease 1: a central component of DNA metabolism. Annu. Rev. Biochem. 73, 589-615 (2004).
[1700] 35. Richardson, C. D., Ray, G. J., DeWitt, M. A., Curie, G. L. & Corn, J. E. Enhancing homology directed genome editing by catalytically active and inactive CRISPR-Cas9 using asymmetric donor DNA. Nat. Biotechnol. 34, 339-344 (2016).
[1701] 36. Qi, L. S. et al. Repurposing CRISPR as an RNA-Guided Platform for Sequence-Specific Control of Gene Expression. Cell 152, 1173-1183 (2013).
[1702] 37. Shechner, D. M., Hacisuleyman, E., Younger, S. T. & Rinn, J. L. Multiplexable, locus-specific targeting of long RNAs with CRISPR-Display. Nat. Methods 12, 664-670 (2015).
[1703] 38. Tang, W., Hu, J. H. & Liu, D. R. Aptazyme-embedded guide RNAs enable ligand-responsive genome editing and transcriptional activation. Nat. Commun. 8, 15939 (2017).
[1704] 39. Jinek, M. et al. Structures of Cas9 Endonucleases Reveal RNA-Mediated Conformational Activation. Science 343, 1247997 (2014).
[1705] 40. Nishimasu, H. et al. Crystal Structure of Cas9 in Complex with Guide RNA and Target DNA. Cell 156, 935-949 (2014).
[1706] 41. Jiang, F., Zhou, K., Ma, L., Gressel, S. & Doudna, J. A. A Cas9-guide RNA complex preorganized for target DNA recognition. Science 348, 1477-1481 (2015).
[1707] 42. Baranauskas, A. et al. Generation and characterization of new highly thermostable and processive M-MuLV reverse transcriptase variants. Protein Eng. Des. Sel. 25, 657-668 (2012).
[1708] 43. Gerard, G. F. et al. The role of template-primer in protection of reverse transcriptase from thermal inactivation. Nucleic Acids Res. 30, 3118-3129 (2002).
[1709] 44. Arezi, B. & Hogrefe, H. Novel mutations in Moloney Murine Leukemia Virus reverse transcriptase increase thermostability through tighter binding to template-primer. Nucleic Acids Res. 37, 473-481 (2009).
[1710] 45. Kotewicz, M. L., Sampson, C. M., D′Alessio, J. M. & Gerard, G. F. Isolation of cloned Moloney murine leukemia virus reverse transcriptase lacking ribonuclease H activity. Nucleic Acids Res. 16, 265-277 (1988).
[1711] 46. Thuronyi, B. W. et al. Continuous evolution of base editors with expanded target compatibility and improved activity. Nat. Biotechnol. (2019). doi:10.1038/s41587-019-0193-0
[1712] 47. Kim, Y. B. et al. Increasing the genome-targeting scope and precision of base editing with engineered Cas9-cytidine deaminase fusions. Nat. Biotechnol. 35, 371-376 (2017).
[1713] 48. Koblan, L. W. et al. Improving cytidine and adenine base editors by expression optimization and ancestral reconstruction. Nat. Biotechnol. (2018). doi:10.1038/nbt.4172
[1714] 49. Kleinstiver, B. P. et al. High-fidelity CRISPR-Cas9 nucleases with no detectable genome-wide off target effects. Nature 529, 490-495 (2016).
[1715] 50. Zuo, E. et al. Cytosine base editor generates substantial off-target single-nucleotide variants in mouse embryos. Science 364, 289-292 (2019).
[1716] 51. Jin, S. et al. Cytosine, but not adenine, base editors induce genome-wide off-target mutations in rice. Science 364, 292-295 (2019).
[1717] 52. Kim, D., Kim, D., Lee, G., Cho, S.-I. & Kim, J.-S. Genome-wide target specificity of CRISPR RNA guided adenine base editors. Nat. Biotechnol. 37, 430-435 (2019).
[1718] 53. Grunewald, J. et al. Transcriptome-wide off-target RNA editing induced by CRISPR-guided DNA base editors. Nature 569, 433-437 (2019).
[1719] 54. Zhou, C. et al. Off-target RNA mutation induced by DNA base editing and its elimination by mutagenesis. Nature 571, 275-278 (2019).
[1720] 55. Rees, H. A., Wilson, C., Doman, J. L. & Liu, D. R. Analysis and minimization of cellular RNA editing by DNA adenine base editors. Sci. Adv. 5, eaax5717 (2019).
[1721] 56. Ostertag, E. M. & Kazazian Jr, H. H. Biology of Mammalian L1 Retrotransposons. Annu. Rev. Genet. 35, 501-538 (2001).
[1722] 57. Griffiths, D. J. Endogenous retroviruses in the human genome sequence. Genome Biol. 2, REVIEWS1017 (2001).
[1723] 58. Berkhout, B., Jebbink, M. & Zsiros, J. Identification of an Active Reverse Transcriptase Enzyme Encoded by a Human Endogenous HERV-K Retrovirus. J. Virol. 73, 2365-2375 (1999).
[1724] 59. Halvas, E. K., Svarovskaia, E. S. & Pathak, V. K. Role of Murine Leukemia Virus Reverse Transcriptase Deoxyribonucleoside Triphosphate-Binding Site in Retroviral Replication and In Vivo Fidelity. J. Virol. 74, 10349-10358 (2000).
[1725] 60. Dever, D. P. et al. CRISPR/Cas9 Beta-globin Gene Targeting in Human Hematopoietic Stem Cells. Nature 539, 384-389 (2016).
[1726] 61. Park, S. H. et al. Highly efficient editing of the β-globin gene in patient-derived hematopoietic stem and progenitor cells to treat sickle cell disease. Nucleic Acids Res. doi:10.1093/nar/gkz475
[1727] 62. Collinge, J. Prion diseases of humans and animals their causes and molecular basis. Annu. Rev. Neurosci. 24, 519-550 (2001).
[1728] 63. Asante, E. A. et al. A naturally occurring variant of the human prion protein completely prevents prion disease. Nature 522, 478-481 (2015).
[1729] 64. Zettler, J., Schutz, V. & Mootz, H. D. The naturally split Npu DnaE intein exhibits an extraordinarily high rate in the protein trans-splicing reaction. FEBS Lett. 583, 909-914 (2009).
[1730] 65. Kugler, S., Kilic, E. & Bahr, M. Human synapsin 1 gene promoter confers highly neuron-specific long-term transgene expression from an adenoviral vector in the adult rat brain depending on the transduced area. Gene Ther. 10, 337-347 (2003).
[1731] 66. de Felipe, P., Hughes, L. E., Ryan, M. D. & Brown, J. D. Co-translational, intraribosomal cleavageof polypeptides by the foot-and-mouth disease virus 2A peptide. J. Biol. Chem. 278, 11441-11448 (2003).

### 1. Establish Guide RNA-Templated Reverse Transcription of Mutagenic DNA Strands.

[1732] Background and Rationale

[1733] In the proposed genome editing strategy, the Cas9-nicked non-target DNA strand (PAM-containing strand that forms the R-loop) acts as the primer for DNA synthesis. It is hypothesized that this is possible based on several pieces of biochemical and structural data. Nuclease protection experiments³², crystallographic studies³³, and base editing windows^{4,24} have demonstrated a large degree of flexibility and disorder for the non-target strand nucleotides −20 through −10 within the so-called R-loop of the Cas9-bound complex (numbering indicates distance 5′ from first PAM nucleotide). Moreover, the PAM-distal portion of the cleaved non-target strand can be displaced from tightly bound ternary complexes when complementary ssDNA is added in trans²⁰. These studies support that the non-target strand is highly flexible, is accessible to enzymes, and that after nicking, the 3′ terminus of the PAM-distal fragment is released prior to Cas9 dissociation. Furthermore, it is hypothesized that gRNAs can be extended to template DNA synthesis. Prior studies have shown that gRNAs for SpCas9, SaCas9, and LbCas12a (formerly Cpf1) tolerate gRNA extensions with RNA aptamers³⁴, ligand-inducible self-cleaving ribozymes³⁵, and long non-coding RNAs³⁶. This literature establishes precedent for two major features that will be exploited. In assessing this strategy, several CRISPR-Cas systems will be evaluated in conjunction with 5′ and 3′ extended gRNA designs using a combination of in vitro and cellular assays (FIGS. 2A-2C).

[1734] Designs for engineered gRNAs for TRT editing are shown in FIGS. 3A-3B. DNA synthesis proceeds 5′ to 3′, and thus copies the RNA template in the 3′ to 5′ direction. The design for the 5′ extension contains a linker region, a primer binding site where the nicked DNA strand anneals, and a template for DNA synthesis by reverse transcription. The 3′ extended gRNA contains a primer binding site and a reverse transcription template. In some cases, the 3′ RNA hairpin of the gRNA core is modified to match the DNA target sequence, as in vitro experiments showed that reverse transcription extends ˜3 nucleotides into the gRNA core for the 3′ extended gRNA constructs (modification of the hairpin sequence appears well tolerated so long as compensatory changes are made that maintain the hairpin RNA structure). DNA synthesis proceed 5′ to 3′, with nucleotides added to the 3′ OH of the growing DNA strand.

[1735] Preliminary Results

[1736] Cas9 nicked DNA primes reverse transcription of gRNA templates. To evaluate the accessibility of the nicked non-target DNA strand, in vitro biochemical assays were performed using the Cas9 nuclease from S. pyogenes (SpCas9) and Cy5 fluorescently labeled duplex DNA substrates (51 base pairs). First, a series of gRNAs containing 5′ extensions with varying synthesis template lengths were prepared by in vitro transcription (overall design shown in FIG. 2B). Electrophoretic mobility shift assays (EMSA) with nuclease dead Cas9 (dCas9) established that 5′ extended gRNAs maintain target binding affinity (data not shown). Next, TPRT activity was tested on pre-nicked Cy5-labeled duplex DNA substrates using dCas9, 5′-extended gRNAs, and Molony-Murine Leukemia Virus (M-MLV) reverse transcriptase (Superscript III). After 1 hour of incubation at 37° C., products were evaluated by denaturing polyacrylamide gel electrophoresis (PAGE) and imaged using Cy5 fluorescence (FIG. 4A). Each 5′-extended gRNA variant led to significant product formation, with the observed DNA product sizes being consistent with the length of the extension template (FIG. 4B). Importantly, in the absence of dCas9, pre-nicked substrates were extended to the full 51-bp length of the DNA substrate, strongly suggesting that the complementary DNA strand, and not the gRNA, was used as the template for DNA synthesis when dCas9 was not present (FIG. 4C). Of note, the system was designed such that the newly synthesized DNA strand mirrors the product that would be required for target site editing (a homologous strand with a single nucleotide change). This result establishes that Cas9:gRNA binding exposes the nicked non-target strand's 3′ end, and that the non-target strand is accessible to reverse transcription.

[1737] Next, non-nicked dsDNA substrates were evaluated using the Cas9(H840A) mutant, which nicks the non-target DNA strand. First, to test Cas9(H840A) nickase activity with 5′-extended gRNAs, in vitro cleavage assays were performed as previously described'. Although nicking was impaired by comparison to the standard gRNA, appreciable cleavage products were formed (FIG. 4D). Importantly, RT products were also observed when TPRT reactions were carried out with 5′-extended gRNAs and Cas9(H840A), albeit at lower yields that are likely explained by the decreased nicking activity (FIG. 4D). This result establishes that 5′-extended gRNA:Cas9(H840A) complexes can nick DNA and template reverse transcription.

[1738] Finally, 3′ gRNA extensions were evaluated for Cas9(H840A) nicking and TPRT. By comparison to 5′-extended gRNAs, DNA cleavage by 3′-extended gRNAs was not impaired to any detectable extent compared to the standard gRNA. Significantly, 3′-extended gRNA templates also supported efficient reverse transcription with both pre-nicked and intact duplex DNA substrates when M-MLV RT was supplied in trans (FIG. 4E). Surprisingly, only a single product was observed for 3′-extended templates, indicating that reverse transcription terminates at a specific location along the gRNA scaffold. Homopolymer tailing of the product with terminal transferase followed by Klenow extension and Sanger sequencing revealed that the full gRNA synthesis template was copied in addition to the terminal 3 nucleotides of the gRNA core. In the future, the flap terminus will be reprogrammed by modifying the terminal gRNA sequence^{38,39}. This result demonstrates that 3′-extended gRNAs can serve as efficient nuclease targeting guides and can template reverse transcription.

[1739] Cas9-TPRT uses nicked DNA and gRNA in cis. Dual color experiments were used to determine if the RT reaction preferentially occurs with the gRNA in cis (bound in the same complex) (see FIG. 8). Two separate experiments were conducted for 5′-extended and 3′-extended gRNAs. For a given experiment, ternary complexes of dCas9, gRNA, and DNA substrate were formed in separate tubes. In one tube, the gRNA encodes a long RT product and the DNA substrate is labeled with Cy3 (red); in the other, the gRNA encodes a short RT product and the DNA substrate is labeled with Cy5 (blue). After short incubations, the complexes were mixed and then treated with RT enzyme and dNTPs. Products were separated by urea-denaturing PAGE and visualized by fluorescence in the Cy3 and Cy5 channels. Reaction products were found to preferentially form using the gRNA template that was pre-complexed with the DNA substrate, indicating that the RT reaction likely can occur in cis. This results supports that a single Cas9:gRNA complex can target a DNA site and template reverse transcription of a mutagenic DNA strand.

Testing TPRT with Other Cas Systems

[1740] Similar experiments to those presented in the previous sections will be carried out using other Cas systems, including Cas9 from S. aureus and Cas12a from L. bacterium (see FIGS. 2A-2C). If TRPT can also be demonstrated for these Cas variants, the potential editing scope and likelihood of overall success in cells would increase.

Testing TPRT with RT-Cas9 Fusion Proteins

[1741] A series of commercially available or purifiable RT enzymes will first be evaluated in trans for TPRT activity. In addition to the already tested RT from M-MLV, the RT from Avian Myeloblastosis Virus (AMV), the Geobacillus stearothermophilus Group II Intron (GsI-IIC)^{41,42}, and the Eubacterium rectale group II intron (Euse.I2)^{43,44} will be evaluated. Significantly, the latter two RTs perform TPRT in their natural biological contexts. Where relevant, RNAse inactivating mutations and other potentially beneficial RT enzyme modifications will be tested. Once functional RTs are identified when supplied in trans, each will be evaluated as a fusion protein to Cas9 variants. Both N-terminus and C-terminus fusion orientations will be tested, along with various linker lengths and architectures. Kinetic time course experiments will be used to determine whether TPRT can occur using the RT enzyme in cis. If an RT-Cas9 fusion architecture can be constructed that allows for efficient TPRT chemistry, this will greatly increase the likelihood of functional editing in the context of a cell.

Cas9 Targeting with Engineered gRNAs in Cells

[1742] Candidate engineered gRNAs developed in the previous sub-aims will be evaluated in human cell culture experiments (HEK293) to confirm Cas9 targeting efficiency. Using established indel formation assays employing wild type SpCas9⁴⁵, engineered gRNAs will be compared side-by-side with standard gRNAs across 5 or more sites in the human genome. Genome editing efficiency will be characterized by amplicon sequencing in multiplex using the Illumina MiSeq platform housed in the laboratory. It is anticipated that results from this and the preceding sections will generate insights that inform subsequent iterations of the design-build-test cycle, where gRNAs can be optimized for both templating reverse transcription and efficient Cas9 targeting in cells.

[1743] Results of in vitro validations are shown in FIGS. 5-7. In vitro experiments demonstrated that the nicked non-target DNA strand is flexible and available for priming DNA synthesis, and that the gRNA extension can serve as a template for reverse transcription (see FIG. 5). This set of experiments used 5′-extended gRNAs (designed as shown in FIGS. 3A-3B) with varying length synthesis templates (listed to the left). Fluorescently labeled (Cy5) DNA targets were used as substrates, and were pre-nicked in this set of experiments. The Cas9 used in these experiments is catalytically dead Cas9 (dCas9), so cannot cut DNA but can still bind efficiently. Superscript III, a commercial RT derived from the Moloney-Murine Leukemia Virus (M-MLV), was supplied in trans. First, dCas9:gRNA complexes were formed from purified components. Then, the fluorescently labeled DNA substrate was added along with dNTPs and the RT enzyme. After 1 hour of incubation at 37 C, the reaction products were analyzed by denaturing urea-polyacrylamide gel electrophoresis (PAGE). The gel image shows extension of the original DNA strand to lengths that are consistent with the length of the reverse transcription template. Of note, reactions carried out in the absence of dCas9 produced DNA products of length 51 nucleotides, regardless of the gRNA used. This product corresponds to use of the complementary DNA strand as the template for DNA synthesis and not the RNA (data not shown). Thus, Cas9 binding is required for directing DNA synthesis to the RNA template. This set of in vitro experiments closely parallels those shown in FIG. 5, except that the DNA substrate is not pre-nicked, and a Cas9 nickase (SpyCas9 H840A mutant) is used. As shown in the gel, the nickase efficiently cleaves the DNA strand when the standard gRNA is used (gRNA_0, lane 3). Multiple cleavage products are observed, consistent with prior biochemical studies of SpyCas9. The 5′ extension impairs nicking activity (lanes 4-8), but some RT product is still observed. FIG. 7 shows that 3′ extensions support DNA synthesis and do not significantly effect Cas9 nickase activity. Pre-nicked substrates (black arrow) are near-quantitatively converted to RT products when either dCas9 or Cas9 nickase is used (lanes 4 and 5). Greater than 50% conversion to the RT product (red arrow) is observed with full substrates (lane 3). To determine the length and sequence of the RT product, the product band was excised from the gel, extracted, and sequenced. This revealed that RT extended 3 nucleotides into the gRNA core's 3′ terminal hairpin. Subsequent experiments (not shown) demonstrated that these three nucleotides could be changed to match target DNA sequences, so long as complementary changes were made that maintain the hairpin RNA structure.

### Potential Difficulties and Alternatives

[1744] (1) RT does not function as a fusion: molecular crowding and/or unfavorable geometries could encumber polymerase extension by Cas9-fused RT enzymes. First, linker optimization can be tested. Circularly permutated variants of Cas9, which could re-orient the spatial relationship between the DNA primer, gRNA, and RT enzyme, will be evaluated. Non-covalent RT recruitment strategies as detailed in Aim 2 can be tested. (2) Decreased Cas targeting efficiency by extended gRNA variants: this is most likely to be an issue for 5′-extended gRNAs. Based on structural data', Cas9 mutants can be designed and screened to identify variants with greater tolerance to gRNA extension. In addition, gRNA libraries could be screened in cells for linkers that improve targeting activity.

[1745] Significance

[1746] These preliminary results establish that Cas9 nickases and extended gRNAs can initiate target-primed reverse transcription on bound DNA targets using a reverse transcriptase supplied in trans. Importantly, Cas9 binding was found to be critically important for product formation. Though perhaps not an absolute requirement for genome editing in cells, further development of the system that incorporates RT enzyme function in cis would significantly increase the likelihood of success in cell-based applications. Achievement of the remaining aspects of this Aim would provide a molecular foundation for carrying out precision genome editing in the context of the human genome.

### 2. Establish Prime Editing in Human Cells.

[1747] Background and Rationale

[1748] In the proposed strategy, an engineered RT-Cas9:gRNA complex will introduce mutagenic 3′ DNA flaps at genomic target sites. It is hypothesized that mutagenic 3′ flaps containing a single mismatch will be incorporated by the DNA repair machinery through energetically accessible equilibration with adjacent 5′ flaps, which would be preferentially removed (FIGS. 1C-1D). The DNA replication and repair machineries encounter 5′ ssDNA flaps when processing Okazaki fragments⁴⁶ and during long-patch base excision repair (LP-BER)⁴⁷. 5′ flaps are the preferred substrates for the widely expressed flap endonuclease FEN1, which is recruited to DNA repair sites by the homotrimeric sliding clamp complex PCNA⁴⁸. PCNA also serves as a scaffold for simultaneous recruitment of other repair factors including the DNA ligase Lig1⁴⁹. Acting as a ‘toolbelt’, PCNA accelerates serial flap cleavage and ligation, which is essential to processing the millions of Okazaki fragments generated during every cell division^{50,51}. Based on resemblance to these natural DNA intermediates, it is hypothesized that mutagenic strands would be incorporated through equilibration with 5′ flaps, followed by coordinated 5′ flap excision and ligation. Mismatch repair (MMR) should then occur on either strand with equal probability, leading to editing or reversion (FIGS. 1C-1D). Alternatively, DNA replication could occur first and lead directly to the incorporation of the edit in the newly synthesized daughter strand. While the highest expected yield from this process is 50%, multiple substrate editing attempts could drive the reaction toward completion due to the irreversibility of editing repair.

[1749] Preliminary Result

[1750] DNA flaps induce site-specific mutagenesis in plasmid model substrates in yeast and HEK cells. To test the proposed editing strategy, studies were initiated with model plasmid substrates containing mutagenic 3′ flaps that resemble the product of TPRT. A dual fluorescent protein reporter was created that encodes a stop codon between GFP and mCherry. Mutagenic flaps encode a correction to the stop codon (FIG. 9A), enabling mCherry synthesis. Thus, mutagenesis efficiency can be quantified by GFP:mCherry ratios. Plasmid substrates were prepared in vitro and introduced into yeast (S. cerevisiae) or human cells (HEK293). High frequency mutagenesis was observed in both systems (FIG. 9B), and isolated yeast colonies contained either the reverted base, the mutated base, or a mixture of both products (FIG. 9C). Detection of the latter suggests that plasmid replication occurred prior to MMR in these cases, and further suggests that flap excision and ligation precede MMR. This result establishes the feasibility of DNA editing using 3′ mutagenic strands.

[1751] Systematic Studies with Model Flap Substrates

[1752] Based on the preliminary results described above, a broader spectrum of flap substrates will be evaluated in HEK cells to infer principles of efficient editing. 3′ ssDNA flaps will be systematically varied to determine the influence of mismatch pairings, the location of the mutagenic nucleotide along the flap, and the identity of the terminal nucleotide (FIG. 9D). Single nucleotide insertions and deletions will also be tested. Amplicon sequencing will be used to analyze editing precision. These results will help inform the design of gRNA reverse transcription templates.

[1753] In vitro TPRT on plasmid substrates leads to efficient editing outcomes. TPRT reactions developed in Aim 1 were used to induce mutagenesis within a plasmid substrate. The reaction was carried out on circular DNA plasmid substrates (see FIG. 10). This rules out the possibility of DNA strand dissociation as the mechanism for RT extension in the previous in vitro experiments. It also allowed for the testing of DNA repair of flap substrates in cells. A dual-fluorescent reporter plasmid was constructed for yeast (S. cerevisiae) expression. This plasmid encodes GFP (green fluorescent protein) and mCherry (red fluorescent protein) with an intervening stop codon (TGA). Expression of this construct in yeast produces only GFP. The plasmid was used as a substrate for in vitro TRT [Cas9(H840A) nickase, engineered gRNA, MLV RT enzyme, dNTPS]. The gRNA extension encodes a mutation to the stop codon. The flap strand is used for repair of the stop codon and it is anticipated to produce a plasmid that expresses both GFP and mCherry as a fusion protein. Yeast dual-FP plasmid transformants are shown in FIG. 10. Transforming the parent plasmid or an in vitro Cas9(H840A) nicked plasmid results in only green GFP expressing colonies. TRT reaction with 5′-extended or 3′-extended gRNAs produces a mix of green and yellow colonies. The latter express both GFP and mCherry. More yellow colonies are observed with the 3′-extended gRNA. A positive control that contains no stop codon is shown as well.

[1754] This result establishes that long double stranded substrates can undergo TPRT, and that TPRT products induce editing in eukaryotic cells.

[1755] Another experiment similar to the foregoing prime editing experiment was carried out, but instead of installing a point mutation in the stop codon, TRT editing installs a single nucleotide insertion (left) or deletion (right) that repairs a frameshift mutation and allows for synthesis of downstream mCherry (see FIG. 11). Both experiments used 3′ extended gRNAs. Individual colonies from the TRT transformations were selected and analyzed by Sanger sequencing (see FIG. 12). Green colonies contained plasmids with the original DNA sequence, while yellow colonies contained the precise mutation designed by the TRT editing gRNA. No other point mutations or indels were observed.

### Establish Prime Editing in HEK Cells Using RT-Cas9 Architectures

[1756] The optimized constructs from previous aims will be adapted for mammalian expression and editing at targeted sites in the human genome. Multiple RT enzymes and fusion architectures will be tested, in addition to adjacent targeting with secondary gRNAs (truncated to prevent nicking). Non-covalent RT recruitment will also be evaluated using the Sun-Tag system⁵² and MS2 aptamer system⁵³. Indel formation assays will be used to evaluate targeting efficiency with standard gRNAs and RT-Cas9 fusions (as above). Then, for each genomic site, extended gRNAs and RT-Cas9 pairs will be assayed for single nucleotide editing. Editing outcomes will be evaluated with MiSeq.

[1757] Initial experiments in HEK cells were performed using Cas9-RT fusions. Editing by components expressed within cells requires a Cas9(H840A) nickase, a reverse transcriptase (expressed as a fusion or supplied in trans), and an engineered gRNA with a 3′ extension (see FIG. 14). Preliminary studies indicated that the length of the primer binding site within the gRNA extension was important for increasing the efficiency of editing in human cells (see FIG. 15).

### Optimize Prime Editing Parameters in HEK Cells

[1758] After identifying Cas9-RT architectures that can perform prime editing in cells, the components and design will be optimized to achieve high efficiency editing. The location and nucleotide identity of the encoded point mutation, and the total length of the newly synthesized DNA strand, will be varied to evaluate editing scope and potential limitations. Short insertion and deletion mutations will also be evaluated. Protein expression constructs will be codon optimized. If successful, this would establish efficient prime editing in mammalian cells.

[1759] Preliminary Result. Additional gRNAs were designed to bring the RT enzyme to a higher local concentration at the editing locus, in the event that intramolecular reverse transcription by the fused RT enzyme were not possible. These auxiliary guides are truncated at the 5′ end (14-15 nt spacer), which has previously been shown to prevent Cas9 cutting but retain binding (see FIG. 16). The HEK3 locus was chosen to explore this strategy.

### Potential Difficulties and Alternatives

[1760] 1) gRNA degradation in cells: if extended gRNA termini are truncated in cells, stabilizing secondary structures could be installed, or synthetic gRNAs with stabilizing modifications could be tested. (2) No observed editing in human cells: additional strategies will be explored, including secondary targeting of RT-Cas9 fusions to adjacent genomic sites⁵⁴. In addition, potential directed evolution strategies in E. coli or S. cerevisiae could be explored.

[1761] Significance

[1762] If prime editing could be established in experimental cell lines, this would have an immediate impact for basic biomedical research by enabling the rapid generation and characterization of a large number of point mutations in human genes. The generality of the method, and its orthogonal editing window with respect to base editors, would provide an approach to installing many currently inaccessible mutations. Moreover, if prime editing could be optimized for high efficiency and product purity, its potential applicability to correcting disease mutations in other human cell types would be significant.

### 3. Achieve Site-Specific Editing of Pathogenic Mutations in Cultured Human Cells.

[1763] Background and Rationale.

[1764] A large number of pathogenic mutations cannot be corrected by current base editors due to PAM restrictions, or a need for transversion or indel mutation correction. With prime editing, all transitions and transversions are theoretically possible, as may be small insertions and deletions. Moreover, in relation to the PAM, the prime editing window (anticipated −3 to +4) is distinct from that of base editors (−18 to −12) (FIG. 13). Mendelian conditions not currently correctable by base editors include: (1) the sickle cell disease Glu6Val founder mutation in hemoglobin beta (requires A•T to T•A transversion); (2) the most common Wilson's disease variant His1069Gln in ATP7B (requires G•C to T•A transversion); and (3) the ΔPhe508 mutation in CFTR that causes cystic fibrosis (requires 3-nucleotide insertion). Each of these targets contains an appropriately positioned PAM for SpCas9 targeting and prime editing.

[1765] Preliminary Results.

[1766] T to A Editing in HEK3 Cells is not Achievable by Current Base Editing but is Achievable by TRPT Editing (see FIGS. 17A-17C).

[1767] FIG. 17A shows a graph displaying the % T to A conversion at the target nucleotide after transfection of components in human embryonic kidney (HEK) cells. This data presents results using an N-terminal fusion of wild type MLV reverse transcriptase to Cas9(H840A) nickase (32-amino acid linker). Editing efficiency was improved dramatically when the length of the primer binding site is extended from 7 nucleotides to 11 or 12 nucleotides. Additionally, the auxiliary guide A, which is positioned just upstream of the editing locus (see FIG. 16), significantly improves editing activity, particularly for shorter length primer binding sites. Editing efficiency was quantified by amplicon sequencing using the Illumina MiSeq platform. FIG. 17B also shows % T to A conversion at the target nucleotide after transfection of components in human embryonic kidney (HEK) cells, but this data presents results using a C-terminal fusion of the RT enzyme. Here, the auxiliary guide A does not have as much of an effect, and editing efficiency is overall higher. FIG. 17C shows data presenting results using an N-terminal fusion of wild type MLV reverse transcriptase to Cas9(H840A) nickase similar to that used in FIG. 17A; however the linker between the MLV RT and Cas9 is 60 amino acids long instead of 32 amino acids.

[1768] T to A Editing at HEK3 Site by TRPT Editing Results Displays High Purity.

[1769] FIG. 18 shows the output of sequencing analysis by high-throughput amplicon sequencing. The output displays the most abundant genotypes of edited cells. Of note, no major indel products are obtained, and the desired point mutation (T to A) is cleanly installed without bystander edits. The first sequence shows the reference genotype. The top two products are the starting genotype containing an endogenous polymorphism (G or A). The bottom two products represent the correctly edited genotypes.

[1770] MLV RT Mutants Improve Editing.

[1771] Mutant reverse transcriptases, described in Baranauskas, et al (doi:10.1093/protein/gzs034), were tested as C-terminal fusions to the Cas9(H840A) nickase for target nucleotide editing in human embryonic kidney (HEK) cells. Cas9-RT editor plasmid was co-transfected with a plasmid encoding a 3′-prime editing guide RNA that templates reverse transcription. Editing efficiency at the target nucleotide (blue bars) is shown alongside indel rates (orange bars) in FIG. 19. WT refers to the wild type MLV RT enzyme. The mutant enzymes (M1 through M4) contain the mutations listed to the right. Editing rates were quantified by high throughput sequencing of genomic DNA amplicons.

Complementary Strand Nicking with a Second gRNA Improves Editing.

[1772] This experiment evaluates editing efficiency of the target nucleotide when a single strand nick is introduced in the complementary DNA strand in proximity to the target nucleotide, with the hypothesis being that this would direct mismatch repair to preferentially remove the original nucleotide and convert the base pair to the desired edit. The Cas9(H840A)-RT editing construct was co-transfected with two guide RNA encoding plasmids, one of which templates the reverse transcription reaction, while the other targets the complementary DNA strand for nicking. Nicking at various distances from the target nucleotide was tested (orange triangles) (see FIG. 20). Editing efficiency at the target base pair (blue bars) is shown alongside the indel formation rate (orange bars). The “none” example does not contain a complementary strand nicking guide RNA. Editing rates were quantified by high throughput sequencing of genomic DNA amplicons.

[1773] FIG. 21 shows processed high throughput sequencing data showing the desired T to A transversion mutation and general absence of other major genome editing byproducts.

[1774] Scope. The potential scope for the new editing technology is shown in FIG. 13 and is compared to deaminase-mediated base editor technologies. Previously developed base editors target a region ˜15±2 bp upstream of the PAM. By converting target C or A nucleotides to T or G, respectively, previously developed base editors enable all transition mutations (A:T to G:C conversions). However, previously developed base editors are unable to install transversion mutations (A to T, A to C, G to T, G to C, T to A, T to G, C to A, C to G). Moreover, if there are multiple target nucleotides in the editing window, additional undesired edits can result.

[1775] The new prime editing technology could theoretically install any nucleotide and base pair conversion, and potentially small insertion and deletion edits as well. With respect to the PAM, prime editing windows start at the site of DNA nicking (3 bases upstream of the PAM) and end at an as-of-yet undetermined position downstream of the PAM. Of note, this editing window is distinct from that of deaminase base editors. Because the TPRT systems performs editing using DNA polymerase enzymes, it potentially has all of their benefits including generality, precision, and fidelity.

### Correct Pathogenic Mutations in Patient-Derived Cell Lines.

[1776] Cell lines harboring the relevant mutations (sickle cell disease: CD34+ hematopoietic stem cells; Wilson's disease: cultured fibroblasts; cystic fibrosis: cultured bronchial epithelia) will be obtained from ATCC, the Coriell Biobank, or collaborating Harvard/Broad affiliate laboratories. Editing efficiency will be evaluated by high throughput sequencing, and the efficacy of the corrected genotype will be tested using phenotypic assays (hemoglobin HPLC, ATP7B immunostaining, and CFTR membrane potential assays).

### Characterize Off-Target Editing Activity.

[1777] Potential off-target editing will be screened with established methods such as GUIDE-seg⁵⁵ and CIRCLE-seq⁵⁶ using target gRNAs paired with wild type Cas9. If potential off-targets are identified, these loci will be probed in TPRT edited cells to identify true off-target editing events.

### Potential Difficulties and Alternatives.

[1778] (1) Low editing efficiency: prime editor (PE)s may require optimization for each target. In this case, gRNA libraries can be tested to identify the highest functioning variants for specific applications. RT-Cas fusion expression and nuclear localization can be optimized. Liposomal RNP delivery could be used to limit off-target editing.

### Upcoming Experiments.

[1779] Optimization of gRNA designs can be achieved by further exploration of the primer binding site length and extension of synthesis template. Testing scope and generality will include different nucleotide conversions, small insertions and deletions, as well as, different editing positions with respect to PAM, and multiple sites in the human genome. Optimization of RT component will include exploring mutations in MLV RT to enhance activity (Rnase H inactivation, increase primer-template binding affinity, adjustments to processivity), and new RT enzymes (group II intro RTs, other retroviral RTs).

[1780] Significance.

[1781] Myriad genetic disorders result from single nucleotide changes in individual genes. Developing the genome editing technology described here, and applying it in disease-relevant cell types, would establish a foundation for translation to the clinic. For some diseases, such as Sickle Cell Disease, a single point mutation represents the dominant genotype throughout the population. However, for many other genetic disorders, a large heterogeneity of different point mutations within a single gene is observed throughout the patient population, each of which gives rise to a similar disease phenotype. Therefore, as a general genome editing method that could in theory target a large number of such mutations, this technology could provide enormous potential benefit to many of these patients and their families If proof of principle for these applications could be established in cells, it would establish the foundation to studies in animal models of disease.

[1782] Advantages

[1783] Precision: the desired edit is encoded directed in nucleic acid sequence. Generality: in theory, could be possible to make any base pair conversion, including transversion edits, as well as small insertions or deletions. There is a distinct editing window from that of base editors with respect to Cas9 protospacer adjacent motif (PAM) sequence. This method achieves many of the editing capabilities of homology-directed repair (HDR), but without the major limitations of HDR (inefficient in most cell types, and is usually accompanied by an excess of undesired byproducts such as indels). Also, it does not make double-stranded DNA breaks (DSBs, so few indels, translocations, large deletions, p53 activation, etc.

### Example 3—Peptide Tagging with PE

[1784] The prime editing systems (i.e., PE systems) described herein may also be used to introduce various peptide tags into protein coding genes. Such tags can include HEXAhistidine tags, FLAG-tag, V5-tag, GCN4-tag, HA-tag, Myc-tag and others. This approach may be useful in applications such as protein fluorescent labeling, immunoprecipitation, immunoblotting, immunohistochemistry, protein recruitment, inducible protein degrons, and genome-wide screening. Embodiments are depicted in FIGS. 25 and 26.

[1785] FIG. 25 is a schematic showing gRNA design for peptide tagging genes at endogenous genomic loci and peptide tagging with TPRT genome editing (i.e., prime editing). The FlAsH and ReAsH tagging systems comprise two parts: (1) a fluorophore-biarsenical probe, and (2) a genetically encoded peptide containing a tetracysteine motif, exemplified by the sequence FLNCCPGCCMEP (SEQ ID NO: 1). When expressed within cells, proteins containing the tetracysteine motif can be fluorescently labeled with fluorophore-arsenic probes (see ref: J. Am. Chem. Soc., 2002, 124 (21), pp 6063-6076. DOI: 10.1021/ja017687n). The “sortagging” system employs bacterial sortase enzymes that covalently conjugate labeled peptide probes to proteins containing suitable peptide substrates (see ref: Nat. Chem. Biol. 2007 Nov; 3(11):707-8. DOI: 10.1038/nchembio.2007.31). The FLAG-tag (DYKDDDDK (SEQ ID NO: 2)), V5-tag (GKPIPNPLLGLDST (SEQ ID NO: 3)), GCN4-tag (EELLSKNYHLENEVARLKK (SEQ ID NO: 4)), HA-tag (YPYDVPDYA (SEQ ID NO: 5)), and Myc-tag (EQKLISEEDL (SEQ ID NO: 6)) are commonly employed as epitope tags for immunoassays. The pi-clamp encodes a peptide sequence (FCPF) (SEQ ID NO: 622) that can by labeled with a pentafluoro-aromatic substrates (ref: Nat. Chem. 2016 February; 8(2):120-8. doi: 10.1038/nchem.2413).

[1786] FIG. 26 shows precise installation of a His6-tag and a FLAG-tag into genomic DNA. A guide RNA targeting the HEK3 locus was designed with a reverse transcription template that encodes either an 18-nt His-tag insertion or a 24-nt FLAG-tag insertion. Editing efficiency in transfected HEK cells was assessed using amplicon sequencing. Note that the full 24-nt sequence of the FLAG-tag is outside of the viewing frame (sequencing confirmed full and precise insertion).

### Example 4—RNA Tagging and Manipulation Using PE

[1787] A new method for the insertion of motifs into genetic sequences that tag or otherwise manipulate RNA within mammalian, eukaryotic, and bacterial cells is described herein. While it is estimated that only 1% of the human genome encodes proteins, virtually all of the genome is transcribed at some level. It is an open question how much of the resulting non-coding RNA (ncRNA) plays a functional role, let alone what the roles of most of these putative RNAs are. “Tagging” of these RNA molecules via the insertion of a novel RNA-encoding sequence with a useful property into genes of interest is a useful method for studying the biological functions of RNA molecules in cells. It can also be useful install tags onto protein-encoding mRNAs as a means to perturb and thus better understand how mRNA modifications can affect cellular function. For instance, a ubiquitous natural RNA tag—polyadenylation—is used by cells to affect transport of mRNA into the cytoplasm. Different types of polyadenylation signals result in different transport rates and different mRNA lifespans and—thus—differences in the levels to which the encoded protein is expressed.

[1788] A common approach for expressing tagged RNAs within cells is to exogenously introduce a synthetic construct using either (i) transient plasmid transfection that produces a short-term burst of gene expression, often at supraphysiologic levels; or (ii) permanent integration of the tagged RNA gene into the genome (at random sites) using lentiviral integration or transposons, which enables prolonged expression. Both of these approaches are limited by production of altered expression levels, and by the absence of natural mechanisms that regulate the expression or activity of the gene. An alternative strategy is to directly tag a gene of interest at its endogenous locus using homology-directed repair (HDR) of double-stranded DNA breaks induced by Cas9 or other targeted DNA nucleases. While this approach enables the generation of a wide range of endogenously tagged genes, HDR is markedly inefficient and so requires significant screening to identify the desired clonal population of cells that have been successfully tagged. Moreover, HDR is typically very inefficient or entirely inactive in a large number of cell types, most notably in post-mitotic cells. The low efficiency of HDR is further complicated by the generation of undesired indel products, would could be especially problematic in the case of RNA genes as they might lead to the production of an RNA whose activities interfere with the function of normal alleles. Finally, researchers often need to screen various tagging positions within an RNA molecule to achieve optimal performance Combined, these drawbacks make HDR a less desirable method for installation of tags in RNA.

[1789] Prime editing is a new genome editing technology that enables targeted editing of genomic loci via the transfer of genetic information from RNA to DNA. Using prime editing, RNA genes could be tagged with a variety of components such as RNA aptamers, ribozymes, or other RNA motifs. Prime editing has the potential to be faster, cheaper, and effective in a greater variety of cell types by comparison to HDR strategies. As such, the described invention represents a novel, useful, and non-obvious tool for investigating the biology of RNA genes in health and disease. A new method for the insertion of RNA motifs into genetic sequences that tag or otherwise manipulate RNA using prime editors (PEs) is described herein. PEs are capable of site-specifically inserting, mutating, and/or deleting multiple nucleotides at a desired genomic locus that is targetable by a CRISPR/Cas system. PEs are composed of fusions between Cas9 nuclease domains and reverse transcriptase domains. They are guided to their genomic target by engineered PEgRNAs (prime editing guide RNAs), which contain a guide spacer portion for DNA targeting, as well as a template for reverse transcription that encodes the desired genome edit (see FIG. 28A). It is envisioned that PE can be used to insert motifs that are functional at the RNA level (hereafter RNA motifs) to tag or otherwise manipulate non-coding RNAs or mRNAs. These motifs could serve to increase gene expression, decrease gene expression, alter splicing, change post-transcriptional modification, affect the sub-cellular location of the RNA, enable isolation or determination of the intra- or extra-cellular location of the RNA (using, for instance, fluorescent RNA aptamers such as Spinach, Spinach2, Baby Spinach, or Broccoli), recruit endogenous or exogenous protein or RNA binders, introduce sgRNAs, or induce processing of the RNA, by either self-cleavage or RNAses (see FIG. 28B). Due to the flexibility of prime editing, it is not possible to provide a comprehensive list of RNA motifs that could be installed within the genome. A series of examples are shown here that broadly illustrate the predicted scope of PE-installed RNA motifs that could be used to tag RNA genes. It is currently not possible to efficiently and fairly cleanly make these changes in most types of cells (including the many that do not support HDR) using any other reported genome editing method besides PE.

[1790] Gene expression could be affected by encoding a 3′ untranslated region (UTR) that results in changes in nuclear transport or retention or mRNA lifespan. For instance, the polyA tail from polyomavirus simian virus 40 (SV40) has additional helper sequences that enable efficient transcription termination and can increase gene expression relative to other 3′ UTRs^{57,58}. Example sequence of SV40 polyA tail:

SV40 POLYA TAIL
(SEQ ID NO: 331)
AACTTGTTTATTGCAGCTTATAATGGTTACAAATAAAGCAATAGCATCA
CAAATTTCACAAATAAAGCATTTTTTTCACTGCATTCTAGTTGTGGTTT
GTCCAAACTCATCAATGTATCTTA

[1791] Post-translational modification signals, besides polyadenylation signals, could also be encoded by PE. These include signals incorporate N6-methyladenosine, N1-methyladenosine, 5-methylcytosine, and pseudouridine modifications⁵⁹. By using PE to include sequences bound by enzymes that write or remove these modifications within an RNA transcript, it would be possible to induce their writing or erasing. This could be used as a tool to study the effects of these markers, to induce cellular differentiation, affect stress responses, or, given the function of these markers are as yet underexplored, affect targeted cells in other fashions.

[1792] PE could encode mutations that affect subcellular localization. For instance, incorporation of tRNA-Lys within an mRNA can theoretically result in transport to the mitochondria⁶⁰, while various 3′ UTRs can result in nuclear retention or transport⁶¹.

### Examples

[1793] SV40 polyA signal results in transport.

SV40 POLYA TAIL
(SEQ ID NO: 331)
AACTTGTTTATTGCAGCTTATAATGGTTACAAATAAAGCAATAGCATCA
CAAATTTCACAAATAAAGCATTTTTTTCACTGCATTCTAGTTGTGGTTT
GTCCAAACTCATCAATGTATCTTA

[1794] U1 snRNA 3′ box results in retention.

U1 SNRNA 3′ BOX
(SEQ ID NO: 625)
TTCATTCAGCAAGTTCAGAGAAATCTGAACTTGCTGGATTTTTGGAGC
AGGGAGATGGAATAGGAGCTTGCTCCGTCCACTCCACGCATCGACCTG
GTATTGCAGTACCTCCAGGAACGGTGCACCCACTTTCTGGAGTTTCAA
AAGTAGACTGTACGCTAAGGGTCATATCTTTTTTTGTTT
GGTTTGTGTCTTGGTTGGCGTCTTAA

[1795] Determining the sub-cellular localization of endogenous RNA can be challenging and requires the addition of exogenous, fluorescently-tagged nucleotide probes, as in the case of FISH, or time-consuming and potentially inaccurate cell fractionation followed by RNA detection. Encoding a probe within the endogenous RNA would obviate many of these issues. One example would be to encode a fluorescent RNA aptamer, such as Spinach' or Broccoli within an endogenous RNA, thereby visualizing the presence of that RNA via addition of a small molecule proto-fluorophore.

[1796] Broccoli Aptamer:

BROCCOLI APTAMER
(SEQ ID NO: 357)
GAGACGGTCGGGTCCAGATATTCGTATCTGTCGAGTAGAGTGTGGGCT
C

[1797] PE could insert or remove sequences that encode RNA that are recognized by RNA binding proteins, affecting RNA stability, expression, localization, or modification (for instance, see proteins listed⁶³).

[1798] PE could insert sequences that encode sgRNAs within the genome, as a viral or cancer defense mechanism. Similarly, it could be used to insert microRNAs (e.g., pre-microRNAs) to direct silencing of targeted genes.

[1799] PE could insert sequences resulting in processing of the RNA, either by itself, or by external factors, either as a therapy or tool for studying the function of various portions of the RNA. For instance, the HDV ribozyme⁶⁴, when included within an RNA sequence, results in processing of the RNA immediately 5′ of the ribozyme, while the hammerhead ribozyme cleaves prior to the third stem within the ribozyme⁶⁵. Other self-cleaving ribozymes include pistol⁶⁶, hatchet⁶⁷, hairpin⁶⁷, Neuropora Varkud satellite⁶⁸, glmS⁶⁹, twister⁷⁰, and twister sister⁶⁶. These sequences could include wild-type or engineered or evolved versions of ribozymes. The majority of these ribozymes could have different sequences depending on the region of RNA into which they were associated, depending on where the ribozyme cut site is located. Sequences that would direct the processing of the RNA by external factors, such as sequence specific RNAses⁷¹, RNAses that recognize specific structures⁷²—such as Dicer⁷³ and Drosha⁷⁴, could also be achieved.

[1800] HDV ribozyme:

| | |
|---|---|
| HDV | GGCCGGCATGGTCCCAGCCTCCTCGCTGGCGCCGG |
| RIBOZYME | CTGGGCAACATGCTTCGGCATGGCGAATGGGAC |
| | (SEQ ID NO: 365) |

### REFERENCES FOR EXAMPLE 4

[1801] The following references are incorporated herein by reference in their entireties.
[1802] 1. Schek N, Cooke C, Alwine J C. Molecular and Cellular Biology. 1992.
[1803] 2. Gil A, Proudfoot N J. Cell. 1987.
[1804] 3. Zhao, B. S., Roundtree, I. A., He, C. Nat Rev Mol Cell Biol. 2017.
[1805] 4. Rubio, M. A. T., Hopper, A. K. Wiley Interdiscip Rev RNA 2011.
[1806] 5. Shechner, D. M., Hacisuleyman E , Younger, S. T., Rinn, J. L. Nat Methods. 2015.
[1807] 6. Paige, J. S., Wu, K. Y., Jaffrey, S. R. Science 2011.
[1808] 7. Ray D., . . . Hughes T R. Nature 2013.
[1809] 8. Chadalavada, D. M., Cerrone-Szakal, A. L., Bevilacqua, P.C. RNA 2007.
[1810] 9. Forster A C, Symons R H. Cell. 1987.
[1811] 10. Weinberg Z, Kim P B, Chen T H, Li S, Harris K A, Lünse C E, Breaker R R. Nat. Chem. Biol. 2015.
[1812] 11. Feldstein P A, Buzayan J M, Bruening G. Gene 1989.
[1813] 12. Saville B J, Collins R A. Cell. 1990.
[1814] 13. Winkler W C, Nahvi A, Roth A, Collins J A, Breaker R R. Nature 2004.
[1815] 14. Roth A, Weinberg Z, Chen A G, Kim P G, Ames T D, Breaker R R. Nat Chem Biol. 2013.
[1816] 15. Choudhury R, Tsai Y S, Dominguez D, Wang Y, Wang Z. Nat Commun. 2012.
[1817] 16. MacRae I J, Doudna J A. Curr Opin Struct Biol. 2007.
[1818] 17. Bernstein E, Caudy A A, Hammond S M, Hannon G J Nature 2001.
[1819] 18. Filippov V, Solovyev V, Filippova M, Gill S S. Gene 2000.

### Example 5—Immunoepitope Insertion by PE

[1820] Precise genome targeting technologies using the CRISPR/Cas system have recently been explored in a wide range of applications, including the insertion of engineered DNA sequences into targeted genomic loci. Previously, homology-directed repair (HDR) has been used for this application, requiring an ssDNA donor template and repair initiation by means of a double-stranded DNA break (DSB). This strategy offers the broadest range of possible changes to be made in cells and is the only method available to insert large DNA sequences into mammalian cells. However, HDR is hampered by undesired cellular side effects stemming from its initiating DSB, such as high levels of indel formation, DNA translocations, large deletions, and P53 activation. In addition to these drawbacks, HDR is limited by low efficiency in many cell types (T cells are a notable exception to this observation). Recent efforts to overcome these drawbacks include fusing human Rad51 mutants to a Cas9 D1OA nickase (RDN), resulting in a DSB-free HDR system that features improved HDR product:indel ratios and lower off target editing, but is still hampered by cell-type dependencies and only modest HDR editing efficiency.

[1821] Recently developed fusions of Cas9 to reverse transcriptases (“Prime editors”) coupled with PEgRNAs represent a novel genome editing technology that offers a number of advantages over existing genome editing methods, including the ability to install any single nucleotide substitution, and to insert or delete any short stretch of nucleotides (up to at least several dozen bases) in a site-specific manner Notably, PE edits are achieved with generally low rates of unintended indels. As such, PE enables targeted insertion-based editing applications that have been previously impossible or impractical.

[1822] This particular invention describes a method for using prime editing as a means to insert known immunogenicity epitopes into endogenous or foreign genomic DNA, resulting in modification of the corresponding proteins for therapeutic or biotechnological applications (see FIGS. 31 and 32). Prior to the invention of prime editing, such insertions could be achieved only inefficiently and with high rates of indel formation from DSBs. prime editing solves the problem of high indel formation from insertion edits while generally offering higher efficiency than HDR. This lower rate of indel formation presents a major advantage of prime editing over HDR as a method for targeted DNA insertions, especially in the described application of inserting immunogenicity epitopes. The length of epitopes is in a range from few bases to hundreds of bases. Prime editor is the most efficient and cleanest technology to achieve such targeted insertions in mammalian cells.

[1823] The key concept of the invention is the use of prime editors to insert a nucleotide sequence containing previously described immunogenicity epitopes into endogenous or foreign genomic DNA for the downregulation and/or destruction of their protein products and/or expressing cell types. Nucleotide sequences for immunogenic epitope insertion would be targeted to genes in a manner to produce fusion proteins of the targeted gene's coded protein and the inserted immunogenic epitope's corresponding protein translation. Patient's immune systems will have been previously trained to recognize these epitopes as a result of standard prior immunization from routine vaccination against, for example, tetanus or diphtheria or measles. As a result of the immunogenic nature of the fused epitopes, patient's immune systems would be expected to recognize and disable the prime edited protein (not just the inserted epitope) and potentially the cells from which it was expressed.

[1824] Fusions to targeted genes would be engineered as needed to ensure the inserted epitope protein translation is exposed for immune system recognition. This could include targeted nucleotide insertions resulting in protein translations yielding C-terminal fusions of immunogenicity epitopes to targeted genes, N-terminal fusions of immunogenicity epitopes to targeted genes, or the insertion of nucleotides into genes so that immunogenicity epitopes are coded within surfaced-exposed regions of protein structure.

[1825] Protein linkers encoded as nucleotides inserted between the target gene sequence and the inserted immunogenicity epitope nucleotide sequence may need to be engineered as part of this invention to facilitate immune system recognition, cellular trafficking, protein function, or protein folding of the targeted gene. These inserted nucleotide-encoded protein linkers may include (but are not limited to) variable lengths and sequences of the XTEN linker or variable lengths and sequences of Glycine-Serine linkers. These engineered linkers have been previous used to successfully facilitate protein fusions.

[1826] Distinguishing features of this invention include the ability to use previously acquired immune responses to specific amino acid sequences as a means to induce an immune response against otherwise non-immunogenic proteins. Another distinguishing feature is the ability to insert the nucleotide sequences of these immunogenic epitopes in a targets manner that does not induce high levels of unwanted indels as a by-product editing and is efficient in its insertion. The invention discussed herein also has the ability to combine cell type-specific delivery methods (such as AAV serotypes) to insert epitopes in cell types that are of interest to trigger an immune response to.

[1827] Prime editing as a means of inserting immunogenic epitopes into pathogenic genes could be used to program the patient's immune system to fight a wide variety of diseases (not limited to cancer as with immuno-oncology strategies). An immediately relevant use of this technology would be as a cancer therapeutic as it could undermine a tumor's immune escape mechanism by causing an immune response to a relevant oncogene like HER2 or growth factors like EGFR. Such an approach could seem similar to T-cell engineering, but one novel advance of this approach is that it can be utilized in many cell types and for diseases beyond cancer, without needed to generate and introduce engineered T-cells into patients.

[1828] Using PE to insert an immunogenicity epitope which most people are already vaccinated against (tetanus, pertussis, diphtheria, measles, mumps, rubella, etc.) into a foreign or endogenous gene that drives a disease, so the patient's immune system learns to disable that protein.

[1829] Diseases that stand to have a potential therapeutic benefit from the aforementioned strategy include those caused by aggregation of toxic proteins, such as in fatal familial insomnia. Other diseases that could benefit include those caused by pathogenic overexpression of an otherwise nontoxic endogenous protein, and those caused by foreign pathogens.

[1830] Primary therapeutic indications include those mentioned above such as therapeutics for cancer, prion and other neurodegenerative diseases, infectious diseases, and preventative medicine. Secondary therapeutic indications may include preventative care for patients with late-onset genetic diseases. It is expected that current standard of care medicines may be used in conjunction with prime editing for some diseases, like particularly aggressive cancers, or in cases where medications help alleviate disease symptoms until the disease completely cured.

Below are Examples of Immunogenic Epitopes that can by Inserted by Prime Editing can be Used to Achieve:

| | | Epitope Amino | Example Nucleic |
|---|---|---|---|
| Vaccine | Disease | Acid Sequence | Acid Sequence (8) |
| 1 | Tetanus toxoid | QYIKANSKFIGITEL | CATGATATAAAAGCAAATTCTAAATTTA |
| | | (SEQ ID NO: 396) | TAGGTATAACTGAACTA (SEQ ID NO: |
| | | | 397) |
| 2 | Diphtheria | GADDVVDSSKSFV | GGCGCCGACGACGTGGTGGACAGCAGC |
| | toxin mutant | MENFSSYHGTKPG | AAGAGCTTCGTGATGGAGAACTTCAGC |
| | CRM197 | YVDSIQKGIQKPKS | AGCTACCACGGCACCAAGCCCGGCTAC |
| | | GTQGNYDDDWKEF | GTGGACAGCATCCAGAAGGGCATCCAG |
| | | YSTDNKYDAAGYS | AAGCCCAAGAGCGGCACCCAGGGCAAC |
| | | VDNENPLSGKAGG | TACGACGACGACTGGAAGGAGTTCTAC |
| | | VVKVTYPGLTKVL | AGCACCGACAACAAGTACGACGCCGCC |
| | | ALKVDNAETIKKEL | GGCTACAGCGTGGACAACGAGAACCCC |
| | | GLSLTEPLMEQVGT | CTGAGCGGCAAGGCCGGCGGCGTGGTG |
| | | EEFIKRFGDGASRV | AAGGTGACCTACCCCGGCCTGACCAAG |
| | | VLSLPFAEGSSSVE | GTGCTGGCCCTGAAGGTGGACAACGCC |
| | | YINNWEQAKALSV | GAGACCATCAAGAAGGAGCTGGGCCTG |
| | | ELEINFETRGKRGQ | AGCCTGACCGAGCCCCTGATGGAGCAG |
| | | DAMYEYMAQACA | GTGGGCACCGAGGAGTTCATCAAGAGG |
| | | GNRVRRSVGSSLSC | TTCGGCGACGGCGCCAGCAGGGTGGTG |
| | | INLDWDVIRDKTKT | CTGAGCCTGCCCTTCGCCGAGGGCAGC |
| | | KIESLKEHGPIKNK | AGCAGCGTGGAGTACATCAACAACTGG |
| | | MSESPNKTVSEEKA | GAGCAGGCCAAGGCCCTGAGCGTGGAG |
| | | KQYLEEFHQTALEH | CTGGAGATCAACTTCGAGACCAGGGGC |
| | | PELSELKTVTGTNP | AAGAGGGGCCAGGACGCCATGTACGAG |
| | | VFAGANYAAWAV | TACATGGCCCAGGCCTGCGCCGGCAAC |
| | | NVAQVIDSETADNL | AGGGTGAGGAGGAGCGTGGGCAGCAGC |
| | | EKTTAALSILPGIGS | CTGAGCTGCATCAACCTGGACTGGGAC |
| | | VMGIADGAVHHNT | GTGATCAGGGACAAGACCAAGACCAAG |
| | | EEIVAQSIALSSLMV | ATCGAGAGCCTGAAGGAGCACGGCCCC |
| | | AQAIPLVGELVDIG | ATCAAGAACAAGATGAGCGAGAGCCCC |
| | | FAAYNFVESIINLFQ | AACAAGACCGTGAGCGAGGAGAAGGCC |
| | | VVHNSYNRPAYSP | AAGCAGTACCTGGAGGAGTTCCACCAG |
| | | GHKTQPFLHDGYA | ACCGCCCTGGAGCACCCCGAGCTGAGC |
| | | VSWNTVEDSIIRTG | GAGCTGAAGACCGTGACCGGCACCAAC |
| | | FQGESGHDIKITAE | CCCGTGTTCGCCGGCGCCAACTACGCCG |
| | | NTPLPIAGVLLPTIP | CCTGGGCCGTGAACGTGGCCCAGGTGA |
| | | GKLDVNKSKTHISV | TCGACAGCGAGACCGCCGACAACCTGG |
| | | NGRKIRMRCRAIDG | AGAAGACCACCGCCGCCCTGAGCATCC |
| | | DVTFCRPKSPVYVG | TGCCCGGCATCGGCAGCGTGATGGGCA |
| | | NGVHANLHVAFHR | TCGCCGACGGCGCCGTGCACCACAACA |
| | | SSSEKIHSNEISSDSI | CCGAGGAGATCGTGGCCCAGAGCATCG |
| | | GVLGYQKTVDHTK | CCCTGAGCAGCCTGATGGTGGCCCAGG |
| | | VNSKLSLFFEIKS | CCATCCCCCTGGTGGGCGAGCTGGTGG |
| | | (SEQ ID NO: 630) | ACATCGGCTTCGCCGCCTACAACTTCGT |
| | | | GGAGAGCATCATCAACCTGTTCCAGGT |
| | | | GGTGCACAACAGCTACAACAGGCCCGC |
| | | | CTACAGCCCCGGCCACAAGACCCAGCC |
| | | | CTTCCTGCACGACGGCTACGCCGTGAGC |
| | | | TGGAACACCGTGGAGGACAGCATCATC |
| | | | AGGACCGGCTTCCAGGGCGAGAGCGGC |
| | | | CACGACATCAAGATCACCGCCGAGAAC |
| | | | ACCCCCCTGCCCATCGCCGGCGTGCTGC |
| | | | TGCCCACCATCCCCGGCAAGCTGGACGT |
| | | | GAACAAGAGCAAGACCCACATCAGCGT |
| | | | GAACGGCAGGAAGATCAGGATGAGGTG |
| | | | CAGGGCCATCGACGGCGACGTGACCTT |
| | | | CTGCAGGCCCAAGAGCCCCGTGTACGT |
| | | | GGGCAACGGCGTGCACGCCAACCTGCA |
| | | | CGTGGCCTTCCACAGGAGCAGCAGCGA |
| | | | GAAGATCCACAGCAACGAGATCAGCAG |
| | | | CGACAGCATCGGCGTGCTGGGCTACCA |
| | | | GAAGACCGTGGACCACACCAAGGTGAA |
| | | | CAGCAAGCTGAGCCTGTTCTTCGAGATC |
| | | | AAGAGC (SEQ ID NO: 399) |
| 3 | mumps | GTYRLIPNARANLT | GGCACCTACAGGCTGATCCCCAACGCC |
| | | A (SEQ ID NO: 400) | AGGGCCAACCTGACCGCC (SEQ ID NO: |
| | | | 401) |
| 4 | mumps | PSKFFTISDSATFAP | Ccgagcaaattttttaccattagcgat |
| | | GPVSNA (SEQ ID | agcgcgacctttgcgccgggcccggtg |
| | | NO: 402) | agcaacgcg |
| | | PSKLFIMLDNATFA | (SEQ ID NO: 403) |
| | | PGPVVNA (SEQ ID | Ccgagcaaactgtttattatgctggat |
| | | NO: 404) | aacgcgacctttgcgccgggcccggtg |
| | | | gtgaacgcg (SEQ ID NO: 405) |
| | | | Selected examples from |
| | | | Hemagglutinin-neuraminidase |
| | | | (HN) diversity among outbreak |
| | | | strains (table1) Divergence |
| | | | between vaccine strain JL5 |
| | | | and outbreak strains (table2) |
| 5 | Rubella virus | TPPPYQVSCGGESD | ACCCCCCCCCCCTACCAGGTGAGCTGCG |
| | (RV) | RASARVIDPAAQS | GCGGCGAGAGCGACAGGGCCAGCGCCA |
| | | (SEQ ID NO: 406) | GGGTGATCGACCCCGCCGCCCAGAGC |
| | | | (SEQ ID NO: 407) |
| 6 | Hemagglutinin | PEYAYKIVKNKKM | CCCGAGTACGCCTACAAGATCGTGAAG |
| | | EDGFLQGMVDGW | AACAAGAAGATGGAGGACGGCTTCCTG |
| | | YGHHSNEQGSGLM | CAGGGCATGGTGGACGGCTGGTACGGC |
| | | ENERTLDKANPNN | CACCACAGCAACGAGCAGGGCAGCGGC |
| | | DLCSWSDHEASSN | CTGATGGAGAACGAGAGGACCCTGGAC |
| | | NTNQEDLLQRESRR | AAGGCCAACCCCAACAACGACCTGTGC |
| | | KKRIGTSTLNQRGN | AGCTGGAGCGACCACGAGGCCAGCAGC |
| | | CNTKCQTEEARLK | AACAACACCAACCAGGAGGACCTGCTG |
| | | REEVSLVKSDQCSN | CAGAGGGAGAGCAGGAGGAAGAAGAG |
| | | GSLQCRANNSTEQ | GATCGGCACCAGCACCCTGAACCAGAG |
| | | VD | GGGCAACTGCAACACCAAGTGCCAGAC |
| | | (SEQ ID NO: 408) | CGAGGAGGCCAGGCTGAAGAGGGAGG |
| | | | AGGTGAGCCTGGTGAAGAGCGACCAGT |
| | | | GCAGCAACGGCAGCCTGCAGTGCAGGG |
| | | | CCAACAACAGCACCGAGCAGGTGGAC |
| | | | (SEQ ID NO: 409) |
| 7 | Neuraminidase | TKSTNSRSGGISGP | ACCAAGAGCACCAACAGCAGGAGCGGC |
| | | DNEAPVGEAPSPYG | GGCATCAGCGGCCCCGACAACGAGGCC |
| | | DNPRPNDGNNIRIG | CCCGTGGGCGAGGCCCCCAGCCCCTAC |
| | | SKGYNGIITDTIEES | GGCGACAACCCCAGGCCCAACGACGGC |
| | | CSCYPDAKVVKSV | AACAACATCAGGATCGGCAGCAAGGGC |
| | | ELDSTIWTSGSSPN | TACAACGGCATCATCACCGACACCATC |
| | | QKIITIGWDPNGWT | GAGGAGAGCTGCAGCTGCTACCCCGAC |
| | | GTPMSPNGAYGTD | GCCAAGGTGGTGAAGAGCGTGGAGCTG |
| | | GPSNGQANQHQAE | GACAGCACCATCTGGACCAGCGGCAGC |
| | | SISAGNSSLCPIRDN | AGCCCCAACCAGAAGATCATCACCATC |
| | | WHGSNRSWSWPD | GGCTGGGACCCCAACGGCTGGACCGGC |
| | | GAE (SEQ ID NO: | ACCCCCATGAGCCCCAACGGCGCCTAC |
| | | 410) | GGCACCGACGGCCCCAGCAACGGCCAG |
| | | | GCCAACCAGCACCAGGCCGAGAGCATC |
| | | | AGCGCCGGCAACAGCAGCCTGTGCCCC |
| | | | ATCAGGGACAACTGGCACGGCAGCAAC |
| | | | AGGAGCTGGAGCTGGCCCGACGGCGCC |
| | | | GAG (SEQ ID NO: 411) |
| 8 | TAP (transport | EKIVLLLAMMEKIV | GAGAAGATCGTGCTGCTGCTGGCCATG |
| | antigen | LLLAKCQTPMGAIK | ATGGAGAAGATCGTGCTGCTGCTGGCC |
| | presentation) | AVDGVTNKCPYLG | AAGTGCCAGACCCCCATGGGCGCCATC |
| | on H5N1 virus | SPSF (SEQ ID NO: | AAGGCCGTGGACGGCGTGACCAACAAG |
| | hemagglutinin | 412) | TGCCCCTACCTGGGCAGCCCCAGCTTC |
| | | | (SEQ ID NO: 413) |
| 9 | TAP (transport | IRPCFWVELNPNQK | ATCAGGCCCTGCTTCTGGGTGGAGCTGA |
| | antigen | IITIRPCFWVELICYP | ACCCCAACCAGAAGATCATCACCATCA |
| | presentation) | DAGEIT (SEQ ID | GGCCCTGCTTCTGGGTGGAGCTGATCTG |
| | on h5n1 virus | NO: 414) | CTACCCCGACGCCGGCGAGATCACC |
| | neuraminidase | | (SEQ ID NO: 415) |
| 10 | hemagglutinin | MEKIVLLLAEKIVL | ATGGAGAAGATCGTGCTGCTGCTGGCC |
| | epitopes toward | LLAMCPYLGSPSFK | GAGAAGATCGTGCTGCTGCTGGCCATGT |
| | class I HLA | CQTPMGAIKAVDG | GCCCCTACCTGGGCAGCCCCAGCTTCAA |
| | | VTNK (SEQ ID NO: | GTGCCAGACCCCCATGGGCGCCATCAA |
| | | 416) | GGCCGTGGACGGCGTGACCAACAAG |
| | | | (SEQ ID NO: 417) |
| 11 | neuraminidase | NPNQKIITICYPDAGE | AACCCCAACCAGAAGATCATCACCATCT |
| | epitopes toward | ITIRPCFWVELRPCFW | GCTACCCCGACGCCGGCGAGATCACCAT |
| | class I HLA | VELI (SEQ ID NO: | CAGGCCCTGCTTCTGGGTGGAGCTGAGGC |
| | | 418) | CCTGCTTCTGGGTGGAGCTGATC (SEQ ID |
| | | | NO: 419) |
| 12 | hemagglutinin | MVSLVKSDQIGTSTL | ATGGTGAGCCTGGTGAAGAGCGACCAGA |
| | epitopes toward | NQR | TCGGCACCAGCACCCTGAACCAGAGG |
| | class II HLA | (SEQ ID NO: 420) | (SEQ ID NO: 421) |
| 13 | neuraminidase | YNGIITDTI (SEQ ID | TACAACGGCATCATCACCGACACCATC |
| | epitopes toward | NO: 422) | (SEQ ID NO: 423) |
| | class II HLA | | |
| 14 | hemagglutinin | MEKIVLLLAEKIVLL | ATGGAGAAGATCGTGCTGCTGCGGCCG |
| | epitope H5N1- | LAMMVSLVKSDQCP | AGAAGATCGTGCTGCTGCTGGCCATGATG |
| | bound class I | YLGSPSFIGTSTLNQR | GTGAGCCTGGTGAAGAGCGACCAGTGCC |
| | and class II | KCQTPMGAIKAVDG | CCTACCTGGGCAGCCCCAGCTTCATCGGC |
| | HLA | VTNK (SEQ ID NO: | ACCAGCACCCTGAACCAGAGG (SEQ ID |
| | | 424) | NO: 425) |
| 15 | neuraminidase | NPNQKIITIYNGIITDT | AACCCCAACCAGAAGATCATCACCATCT |
| | epitope H5N1- | ICYPDAGEITIRPCFW | ACAACGGCATCATCACCGACACCATCTGC |
| | bound class I | VELRPCFWVELI | TACCCCGACGCCGGCGAGATCACCATCA |
| | and class II | (SEQ ID NO: 426) | GGCCCTGCTTCTGGGTGGAGCTGAGGCCC |
| | HLA | | TGCTTCTGGGTGGAGCTGATC (SEQ ID |
| | | | NO: 427) |

[1831] Below are additional examples of epitopes that may be integrated into a target gene for immunoepitope taggin:

### REFERENCES CITED IN EXAMPLE 5

[1832] The following references are incorporated by reference in their entireties.
[1833] 1. X. Wen, K. Wen, D. Cao, G. Li, R. W. Jones, J. Li, S. Szu, Y. Hoshino, L. Yuan, Inclusion of a universal tetanus toxoid CD4(+) T cell epitope P2 significantly enhanced the immunogenicity of recombinant rotavirus ΔVP8* subunit parenteral vaccines. Vaccine 32, 4420-4427 (2014).
[1834] 2. G. Ada, D. Isaacs, Carbohydrate-protein conjugate vaccines. Clin Microbiol Infect 9, 79-85 (2003).
[1835] 3. E. Malito, B. Bursulaya, C. Chen, P. L. Surdo, M. Picchianti, E. Balducci, M. Biancucci, A. Brock, F. Berti, M. J. Bottomley, M. Nissum, P. Costantino, R. Rappuoli, G. Spraggon, Structural basis for lack of toxicity of the diphtheria toxin mutant CRM197. Proceedings of the National Academy of Sciences 109, 5229 (2012).
[1836] 4. J. de Wit, M. E. Emmelot, M. C. M. Poelen, J. Lanfermeijer, W. G. H. Han, C. van Els, P. Kaaijk, The Human CD4(+) T Cell Response against Mumps Virus Targets a Broadly Recognized Nucleoprotein Epitope. J Virol 93, (2019).
[1837] 5. M. May, C. A. Rieder, R. J. Rowe, Emergent lineages of mumps virus suggest the need for a polyvalent vaccine. Int J Infect Dis 66, 1-4 (2018).
[1838] 6. M Ramamurthy, P. Rajendiran, N. Saravanan, S. Sankar, S. Gopalan, B. Nandagopal, Identification of immunogenic B-cell epitope peptides of rubella virus El glycoprotein towards development of highly specific immunoassays and/or vaccine. Conference Abstract, (2019).
[1839] 7. U. S. F. Tambunan, F. R. P. Sipahutar, A. A. Parikesit, D. Kerami, Vaccine Design for H5N1 Based on B- and T-cell Epitope Predictions. Bioinform Biol Insights 10, 27-35 (2016).

### Example 6—Use of PE to Enable Chemical-Induced Dimerization of Target Proteins In Vivo

[1840] The prime editors described herein may also be used to place dimerization-induced biological processes, such as receptor signaling, under control of a convenient small-molecule drug by the genomic integration of genes encoding small-molecule binding proteins with prime editing is described herein. Using the prime editors described herein, the gene sequence encoding a small-molecule binding protein may be inserted within a gene encoding a target protein of interest in a living cell or patient. This edit alone should have no physiological effect. Upon administration of the small-molecule drug, which typically is a dimeric small molecule that can simultaneously bind to two drug-binding protein domains each of which is fused to a copy of the target protein, the small-molecule induces dimerization of the targeted protein. This target protein dimerization event then induces a biological signaling event, such as erythropoiesis or insulin signaling.

### Example 7—DNA Sequence Insertion, Deletion, and Replacement with Dual Prime Editors

[1841] This Example describes the use of multi-flap prime editing, specifically using dual prime editors, for the precise insertion of new DNA sequence, the precise deletion of endogenous genomic DNA sequence, or the replacement of an endogenous genomic DNA sequence with a new DNA sequence. See FIG. 90. This invention addresses a long-standing objective in genome engineering: the programmable insertion, deletion, or replacement of DNA sequences in the genomes of living cells. This technology could be applied to modify or edit the genome of any living cell for research, therapeutic, or industrial applications.

[1842] Previously, homology directed repair (HDR) of nuclease-induced double-strand DNA breaks (DSBs) has been used to insert, delete, or replace DNA sequences in the genomes of living cells. While versatile, the low efficiency of HDR limits its application in many mammalian cell types, especially therapeutically relevant human cell types¹⁻⁴. Moreover, the generation of DSBs leads to preferential repair by error-prone end-joining mechanisms that produce insertion and deletion (indel) repair products which cannot be subsequently converted to the desired edited DNA sequence⁵¹⁰ . As a result, indels typically represent the majority of modified genomic DNA products when nucleases are used in mammalian cells. Moreover, DSBs generated by nucleases can lead to undesired genomic changes such as large deletions and chromosomal translocations¹¹, and the activation of p53^{12,13} Structural variants (SVs) can also be generated or corrected using programmable nucleases without relying on homologous recombination, though nuclease-based strategies suffer similar drawbacks for these applications. For example, dual-cutting strategies can be used to invert a targeted genomic DNA sequence, but most product alleles contain large deletions between the cut sites instead of the desired inverted sequence, or indels at the individual cut sites.

[1843] Prime editing is a recently reported genome editing technology that enables the insertion, deletion, or replacement of genomic DNA sequences without requiring error-prone double-strand DNA breaks¹⁴. Prime editing uses an engineered Cas9 nickase-reverse transcriptase fusion protein (PE1 or PE2) paired with an engineered prime editing guide RNA (pegRNA) that both directs Cas9 to the target genomic site and encodes the information for installing the desired edit. Prime editing proceeds through a multi-step editing process: 1) the Cas9 domain binds and nicks the target genomic DNA site, which is specified by the pegRNA's spacer sequence; 2) the reverse transcriptase domain uses the nicked genomic DNA as a primer to initiate the synthesis of an edited DNA strand using an engineered extension on the pegRNA as a template for reverse transcription—this generates a single-stranded 3′ flap containing the edited DNA sequence; 3) cellular DNA repair resolves the 3′ flap intermediate by the displacement of a 5′ flap species that occurs via invasion by the edited 3′ flap, excision of the 5′ flap containing the original DNA sequence, and ligation of the new 3′ flap to incorporate the edited DNA strand, forming a heteroduplex of one edited and one unedited strand; and 4) cellular DNA repair replaces the unedited strand within the heteroduplex using the edited strand as a template for repair, completing the editing process.

[1844] Efficient incorporation of the desired edit requires that the newly synthesized 3′ flap contains a portion of sequence that is homologous to the genomic DNA site. This homology enables the edited 3′ flap to compete with the endogenous DNA strand (the corresponding 5′ flap) for incorporation into the DNA duplex. Because the edited 3′ flap will contain less sequence homology than the endogenous 5′ flap, the competition is expected to favor the 5′ flap strand. Thus, the 3′ flap, which contains the edit, may fail to effectively invade and displace the 5′ flap strand. Moreover, successful 3′ flap invasion and removal of the 5′ flap only incorporates the edit on one strand of the double-stranded DNA genome. Permanent installation of the edit requires cellular DNA repair to replace the unedited complementary DNA strand using the edited strand as a template. While the cell can be made to favor replacement of the unedited strand over the edited strand (step 4 above) by the introduction of a nick in the unedited strand adjacent to the edit using a secondary sgRNA (the PE3 system), this process still relies on a second stage of DNA repair. These DNA repair steps may be particularly inefficient for edits which require equilibration of long 5′ and 3′ flap intermediates or contain long non-homologous regions, such as long insertions or long deletions.

[1845] This Example describes a dual prime editing system (or a dual-flap prime editing system) that addresses the challenges associated with flap equilibration and subsequent incorporation of the edit into the non-edited complementary genomic DNA strand by simultaneously editing both DNA strands. In the dual-flap prime editing system, two pegRNAs are used to target opposite strands of a genomic site and direct the synthesis of two complementary 3′ flaps containing edited DNA sequence (FIG. 91). Unlike classical prime editing, there is no requirement for the pair of edited DNA strands (3′ flaps) to directly compete with 5′ flaps in endogenous genomic DNA, as the complementary edited strand is available for hybridization instead. Since both strands of the duplex are synthesized as edited DNA, the dual-flap prime editing system obviates the need for the replacement of the non-edited complementary DNA strand required by classical prime editing. Instead, cellular DNA repair machinery need only excise the paired 5′ flaps (original genomic DNA) and ligate the paired 3′ flaps (edited DNA) into the locus. Therefore, there is also no need to include sequences homologous to genomic DNA in the newly synthesized DNA strands, allowing selective hybridization of the new strands and facilitating edits that contain minimal genomic homology. Nuclease-active versions of prime editors that cut both strands of DNA could also be used to accelerate the removal of the original DNA sequence.

[1846] Depending on the orientation of the staggered DNA nicks generated by dual prime editors, the system can either replace the sequence between the two nicks with a new desired sequence (5′ overhang staggered orientation), or insert new DNA sequence with concomitant target site duplication (3′ overhang staggered orientation). FIG. 90 shows an orientation (5′ displaced nicks) where the sequence between the nicks is replaced. Of note, the new 3′ flaps need not overlap completely along the length of the new DNA sequence, but instead can be complementary in just a portion of the new sequence. In this way, each flap can be shorter than the full length of the new DNA sequence.

### Dual-Flap Prime Editing at the HEK293 Site 3 Locus

[1847] Dual-flap prime editing at the HEK293 site 3 locus in human cells (HEK293T) was used to achieve highly efficient introduction of heterologous DNA sequences. For example, replacement of a 90-bp sequence in the locus with a new 22-bp sequence that encodes a 6xHis tag occurred with greater than 80% efficiency (FIG. 92 allele table). Similarly, >60% yield was achieved for replacing this same 90-bp sequence with a GFP-11 peptide sequence (52 bp). The GFP-11 tag insertion was also performed at the C-terminus of the MYC gene with an efficiency of >20%, occurring with concomitant programmed deletion of a portion of the Myc 3′ UTR sequence.

Dual-Flap Prime Editing pegRNAs

[1848] The general designs of pegRNAs used for dual-flap prime editing are shown in FIG. 93. pegRNAs used for dual-flap prime editing have a similar design to those used for classic prime editing, however it is not necessary for the RT template region to encode any homology to the target locus. Instead, the two pegRNAs may contain RT templates that encode the synthesis of 3′ flaps whose 3′ ends are reverse complement sequences of one another. This complementarity between the 3′ flaps promotes their annealing and replacement of the endogenous DNA sequence with the intended new DNA sequence. This necessitates that the 5′ regions of the RT templates in the two pegRNAs are reverse complement sequences to one another, and this amount of complementarity can vary (FIG. 93).

### Use of Dual-Flap Prime Editing to Install Recombination Sites

[1849] Dual-flap prime editing has many potential applications, such as installing peptide tags, RNA tags, immunoepitopes, dimerization domains, and recombinase target sites.

[1850] One such application is the installation of recombinase or integrase sequences at user-specified locations in the genome. FIG. 94 illustrates the installation of Bxb1 recombinase attB (38 bp) and attP (50 bp) sites into a targeted region of the human genome (HEK293T site 3, or HEK3) with simultaneous deletion of 90 bp of intervening sequence between the two nick sites. Various degrees of complementarity between 3′ flaps allow for successful editing, though longer sequences of complementarity produce more favorable ratios of desired edits to indels. Other dual-flap prime editing applications include endogenous tagging of genes with peptide or protein sequences, or the replacement of exons with new DNA sequences that have the potential to substitute for multiple variants for which the mutation falls within the exon sequence.

[1851] Dual-flap prime editing can be used to introduce one or two recombinase sites at targeted positions in the human genome. If single recombinase sites are inserted, these can be used as landing sites for a recombinase-mediated reaction between the genomic recombinase site and a second recombinase site within an exogenously supplied DNA, such as a plasmid. This enables the targeted integration of DNA cargo. If two recombinase sites are inserted in adjacent regions of DNA, depending on the orientation of the recombinase sites, these can be used for recombinase-mediated excision or inversion of the intervening sequence, or for recombinase-mediated cassette exchange with exogenous DNA for cargo integration. Integration of compatible recombinase sites on different chromosomes enables targeted and directional chromosomal translocation. Dual-flap prime editing can be used to efficiently introduce recombinase sites at a number of loci in the human genome (FIG. 94). Thus, the pairing of recombinase site integration by dual-flap prime editing with DNA recombinase enzymes represents a powerful approach for achieving many types of SV edits and target integration of DNA cargo.

### Example 8—DNA Sequence Insertion, Deletion, Inversion, Translocation, and Integration Using Quadruple-Flap Prime Editing

[1852] This Example describes the use of multi-flap prime editing, specifically quadruple-flap prime editing, for targeted insertion, deletion, duplication, and replacement of endogenous genomic DNA sequences, and for targeted genomic DNA sequence inversion, targeted chromosomal translocation, and targeted integration of exogenous DNA. This technology has the potential to address long-standing objectives in genome engineering: the programmable installation or correction of structural variants (generally defined as >50 bp of genomic sequence change, often represented by large deletions, insertions/duplications, inversion, and translocations), and the targeted integration of DNA cargo at a specific location in the human genome. The latter could enable gene augmentation therapeutic strategies and other biotechnology applications. This technology could potentially be applied to modify or edit the genome of any living cell for research, therapeutic, or industrial applications.

[1853] This invention describes a multi-flap prime editing system that addresses the challenges associated with flap equilibration and subsequent incorporation of the edit into the non-edited complementary genomic DNA strand by simultaneously editing both DNA strands. It also expands upon the capabilities of traditional prime editing by allowing the newly synthesized 3′ flaps to direct larger sequence rearrangements.

[1854] A quadruple-flap prime editing approach was developed that can directly carry out desired sequence alterations without the need for a recombinase enzyme (as in dual-flap prime editing) but with similar versatility. In quadruple-flap prime editing, four different pegRNA sequences are delivered to cells along with the PE2 editor. One pair of pegRNAs template the synthesis of complementary DNA flaps, as with dual-flap prime editing, while the other pair of pegRNAs template the synthesis of an orthogonal pair of complementary DNA flaps. The location of these flaps, their relative orientation, and the pairing of complementarity dictates which class of rearrangement will occur. The junctions of the rearranged DNA contain the sequence encoded by the pegRNA-templated 3′ flaps, which direct the orientation of the rearrangement and can serve as useful DNA sequence for downstream processes. Targeted genomic sequence inversion was performed with the quadruple-flap prime editing strategy (FIG. 95). An inversion of a 2.7-kb sequence at the AAVS1 locus in HEK293T cells was achieved using four pegRNAs that place Bxb1 attB and attP sequences at the inversion junctions. Verification of the expected junctions was performed using amplicon sequencing, which demonstrated the correct junctions containing the attB or attP site sequences in ≥90% of the sequencing reads (FIG. 96).

[1855] Targeted integration of exogenous DNA plasmids was also achieved with quadruple-flap prime editing. In this approach, two pegRNAs target the endogenous genomic DNA site while two pegRNAs target a region on the cargo plasmid. 3′ DNA flaps are synthesized on both the genomic DNA and plasmid DNA so that the plasmid and genomic DNA will be bridged by hybridized 3′ flaps (FIG. 97A). The excision of 5′ overhangs and ligation of the nicks results in an integrated plasmid product. The orientation of integration can be controlled by the pairing of pegRNA template sequences.

[1856] A plasmid encoding the expression of a H2B-GFP fusion protein was integrated at the AAVS1 locus in HEK293T cells using quadruple-flap prime editing. This resulted in 1.6% of cells obtaining long-lasting, nuclear localized GFP fluorescence, as assessed by flow cytometry. PCR of a predicted junction showed the expected product containing the pegRNA-templated BxB1 attP sequence (FIG. 97B).

[1857] Chromosomal translocations were also performed using quadruple flap prime editing (FIG. 98A) to direct a chromosomal translocation between the MYC locus on chromosome 8 and the TIMM44 locus on chromosome 19 (FIG. 98B).

[1858] Dual flap prime editing at the IDS locus was performed with 12 pairs of pegRNAs and PE2. HEK293T cells were transfected with PE2 and different pairs of pegRNAs (e.g., in the first column pegRNA A1_a and pegRNA B2_a with templates for installing attP site in the forward direction). The efficiency was measured by HTS. This data showed that dual-flap editing can successfully insert the sequence of interest to the IDS locus with an efficiency up to ˜80% (FIG. 99).

[1859] Dual-flap-mediated duplication was also performed at the AAVS1 locus in 293T cells (FIG. 100A). Dual-flap pegRNA with PE2 was used to induce duplication of genetic sequences at AAVS1 (FIG. 100B).

[1860] Multi-flap prime editing induced translocation of MYC-CCRS was also performed (FIG. 101). MYC-CCRS translocation was induced by quad-flap pegRNAs and PE2. MYC-CCRS translocation events were induced by quadruple-pegRNAs. Four different sets of pegRNAs were tested in HEK293T cells. The translocation junction products between derived chr8 and chr3 were amplified by junction primers. The percent of reads aligned to the expected junction alleles are shown in the graph. This shows that quadruple-flap prime editing can mediate translocation of MYC and CCRS gene with product purity near 100% at junction 1 and ˜50% at junction 2. A representative allele plot shows the sequences aligned to the expected allele sequences at junction 1.

[1861] Dual-flap and quadruple-flap prime editing were also performed in other human cell lines (FIGS. 102A-102B). Dual-flap prime editing was performed in four different human cell lines (FIG. 102A). HEK293T and HeLa cells were transfected with dual pegRNAs and PE2 for editing three different genomic loci (IDS, MYC, and TIMM44). U2OS and K562 cells were nucleofected with the same components. Dual-flap prime editing showed robust editing efficiency across all four human cells at the targeted loci, particularly at HEK293T and K562 cells. The cellular mechanisms for enabling dual-flap prime editing are conserved across many human cell types. Multi-flap (quadruple-pegRNA) directed inversion of a 2.7 kb sequence was also performed at the AAVS1 locus in HeLa cells (FIG. 102B).

[1862] Inversion efficiency was also measured by HTS at the CCRS locus (FIG. 103A-103B). Percentage of the expected inversion edit allele was measured by HTS. Four quad-pegRNA sets of PE2 were transfected in HEK293T cells, respectively. Dual-flap mediated sequence duplication (˜100nt) at the CCRS locus in HEK293T cells was performed (FIG. 103A). The editing efficiency achieves ˜1.5% via HTS 300-cycle pair-end sequencing analysis. Quadruple-flap-mediated sequence inversion (˜95-117nt) was also performed at the CCRS locus in HeLa cells (FIG. 103B). The editing efficiency achieves ˜1.2% via HTS 300-cycle pair-end sequencing analysis. This result shows that multi-flap prime editing can successfully mediate duplication and inversion at the CCRS locus precisely. The editing specificity is high when the targeted sequence is duplicated (percentage of indels <2%).

[1863] Next, HEK293T cells were transfected with the plasmids that express Exol, Fenl, Red Fluorescence Protein (control), DNA2, Mlhl neg, and P53 inhibitor with pegRNA and PE2 (FIGS. 104A-104D). The editing efficiency was measured by HTS. The editing efficiency was compared between the candidate and the RFP control. HEK293T cells were also transfected with the siRNA plasmids and pegRNA and PE2 for each target locus (FIG. 104E). Non-targeting siRNA (siNT) was used as the control. The editing efficiency was measured by HTS. The editing efficiency was compared between each siRNA knockdown and the siNT ctrl at each target locus. HEK293T cells were transfected with dual-pegRNAs, PE2, and the plasmids that express Exol, Fenl, Red Fluorescence Protein (ctrl), DNA2, Mlhl neg, and P53 inhibitor, respectively. The editing efficiency was measured by HTS. The editing efficiency was compared between the candidate and the RFP control. It was found that overexpression of FEN1 improves dual flap editing efficiency in all four targeted loci (MYC, TIMM44, IDS, CCRS).

[1864] Dual-flap-mediated sequence duplication was also performed at the AAVS1 locus (FIG. 105A). By using dual pegRNAs that generate two unique 3′ flap structures, a ˜300bp sequence duplication was induced at AAVS1 locus in 293T cells (FIG. 105B). Expected alleles were amplified with specific primers and subjected for HTS. Approximately 94% of reads were aligned to the expected alleles with duplication. Duplication products were not observed in the untreated samples.

[1865] Targeted IDS genomic sequence inversion was also performed with quadruple-flap prime editing (FIG. 106). Approximately 13% of Hunter syndrome patients have been shown to have an inversion of the IDS gene sequences (Bondeson et al., Human Molecular Genetics, 1995). Quadruple-flap prime editing was applied to induce this pathogenic inversion of the approximately 40kb IDS genomic sequence in the HEK293T cells. Six sets of quadruple pegRNAs were tested by transfecting HEK293T cells with the pegRNAs and PE2. Primers were used to specifically amplify the inverted sequences at junction “ab” and junction “cd”. Approximately 95% of the expected inverted allele sequences were observed at both junctions with IDS_QF1. Other sets of pegRNAs also yield high percentage of the expected allele sequences at both junctions. Inverted junction products are not observed in the untreated samples.

[1866] It was also found that PegRNA 3′ motif modification improves dual-flap editing efficiency at the IDS locus (FIG. 107). To further improve the dual flap editing efficiency, a pseudoknot evoPreQ1 motif was introduced to protect the pegRNA 3′ end. In comparing the editing efficiency generated by the unmodified and evoPreQ1-modified dual pegRNAs, there was an overall increase of the editing efficiency with modified pegRNAs at the targeted IDS locus. The improvement of dual-flap editing efficiency can reach up to 5.3-fold.

### REFERENCES (EXAMPLES 7 AND 8)

[1867] 1. Rouet, P., Smih, F. & Jasin, M. Expression of a site-specific endonuclease stimulates homologous recombination in mammalian cells. PNAS 91, 6064-6068 (1994).

[1868] 2. Heyer, W.-D., Ehmsen, K. T. & Liu, J. Regulation of homologous recombination in eukaryotes. Annu. Rev. Genet. 44, 113-139 (2010).

[1869] 3. Chapman, J. R., Taylor, M. R. G. & Boulton, S. J. Playing the end game: DNA double-strand break repair pathway choice. Mol. Cell 47, 497-510 (2012).

[1870] 4. Cox, D. B. T., Platt, R. J. & Zhang, F. Therapeutic genome editing: prospects and challenges. Nature Medicine 21, 121-131 (2015).

[1871] 5. Rouet, P., Smih, F. & Jasin, M. Introduction of double-strand breaks into the genome of mouse cells by expression of a rare-cutting endonuclease. Mol Cell Biol 14, 8096-8106 (1994).

[1872] 6. Bibikova, M., Golic, M., Golic, K. G. & Carroll, D. Targeted chromosomal cleavage and mutagenesis in Drosophila using zinc-finger nucleases. Genetics 161, 1169-1175 (2002).

[1873] 7. Urnov, F. D., Rebar, E. J., Holmes, M. C., Zhang, H. S. & Gregory, P. D. Genome editing with engineered zinc finger nucleases. Nat Rev Genet 11,636-646 (2010).

[1874] 8. Mali, P. et al. RNA-guided human genome engineering via Cas9. Science 339,823-826 (2013).

[1875] 9. Cong, L. et al. Multiplex genome engineering using CRISPR/Cas systems. Science 339, 819-823 (2013).

[1876] 10. Jinek, M. et al. RNA-programmed genome editing in human cells. eLife 2, e00471 (2013).

[1877] 11. Kosicki, M., Tomberg, K. & Bradley, A. Repair of double-strand breaks induced by CRISPR—Cas9 leads to large deletions and complex rearrangements. Nature Biotechnology 36,765-771 (2018).

[1878] 12. Ihry, R. J. et al. p53 inhibits CRISPR—Cas9 engineering in human pluripotent stem cells. Nature Medicine 24,939-946 (2018).

[1879] 13. Haapaniemi, E., Botla, S., Persson, J., Schmierer, B. & Taipale, J. CRISPR—Cas9 genome editing induces a p53-mediated DNA damage response. Nature Medicine 24,927-930 (2018).

[1880] 14. Anzalone, A. V. et al. Search-and-replace genome editing without double-strand breaks or donor DNA. Nature 576, 149-157 (2019).

### Example 9—Programmable Large DNA Deletion, Replacement, Integration, and Inversion with Twin Prime Editing and Site-Specific Recombinases

[1881] The targeted deletion, replacement, integration, or inversion of DNA sequences at specified locations in the genome can in principle be used to study or treat many human genetic diseases. However, it remains challenging to precisely and efficiently carry out these DNA sequence transformations in the context of a mammalian cell genome. Presented herein is twin prime editing (twinPE), a method for the programmable replacement or excision of DNA sequence at endogenous human genomic sites without requiring double-strand DNA breaks. twinPE employs a prime editor (PE) protein and two prime editing guide RNAs (pegRNAs) that template the synthesis of complementary DNA flaps on opposing strands of genomic DNA, resulting in the replacement of endogenous DNA sequence between the PE-induced nick sites with pegRNA-encoded sequences. It is shown herein that twinPE can perform precise deletions of up to 780 bp and precise replacements of genomic DNA sequence with new sequences of up to 108 bp. By combining single or multiplexed twinPE with site-specific serine recombinases, it is demonstrated that targeted integration of gene-sized DNA plasmids at safe-harbor loci including AAVS1, CCR5, and ALB, and further, a 39-kb inversion at IDS that could be used to correct a common Hunter syndrome allele is also demonstrated. TwinPE substantially expands genome editing capabilities without requiring double-strand DNA breaks and, in combination with other genome editing tools, enables the correction or complementation of complex pathogenic allele variants in human cells.

[1882] Disease-associated human genetic variants arise through a variety of sequence changes, ranging from single-base pair substitutions to mega base-scale deletions and rearrangements. Genome editing approaches that can install, correct, or complement these pathogenic variants in human cells have the potential to advance understanding of human genetic disease and could lead to the development of novel therapeutics. Recently, several genome editing approaches based on CRISPR-Cas systems have been developed for genome editing, including nucleases, base editors, and prime editors. CRISPR-Cas nucleases, when used with one guide RNA, can be used to disrupt genes through the generation of double-strand DNA breaks (DSBs) that lead to stochastic indels. Base editors can be used to precisely install C•G-to-T•A or A•T-to-G•C transition base pair edits, or C•G-to-G•C base pair edits. Prime editors can precisely install of any one of the twelve base pair substitution edits as well as small to medium-sized insertions and deletions. However, these strategies alone are not directly applicable for making more substantial genome edits, such as large deletions, insertions, replacements, or inversions.

[1883] Previously, paired Cas9 nuclease strategies have been developed for the targeted deletion of genomic DNA sequences ranging from ˜50 to >100,000 base pairs in length. Moreover, by providing a linear donor DNA sequence, targeted insertion of new DNA sequences can be performed at single cut sites or between paired cut sites through end-joining or homology-directed DNA repair processes. While versatile in many ways, single-nuclease and paired-nuclease approaches are accompanied by several drawbacks. First, the use of paired nucleases for deletions can generate multiple on-target byproducts, including the desired deletion with indels, indels at individual DSB sites without the desired deletion, undesired inversion of the DNA sequence between DSB sites, and unintended integration of exogenous DNA sequence at DSB sites. Furthermore, the precise location of the deletions is restricted by PAM availability and the corresponding cut sites generated by the nuclease. Similar restrictions and byproducts exist for DNA donor knock-in, which often occurs without control of sequence orientation when homology-independent approaches are used. Finally, the simultaneous generation of multiple DSBs at on-target and off-target sites, which becomes more likely with additional guide RNAs, can lead to off-target genome modification, chromosomal rearrangements, or chromothripsis. Therefore, considerable challenges exist relating to product control and purity when applying nuclease-based editing strategies for the excision, replacement, or insertion of larger DNA sequences.

[1884] Prime editing has been shown to be capable of making precise insertions of up to ˜40 bp and deletions of up to ˜80bp in human cells with high desired product to byproduct ratios. In principle, prime editing could be used to circumvent many of the challenges associated with nucleases by avoiding the generation of DSBs. However, prime editing has not yet been shown to mediate larger insertions and deletions of the size of typical gene coding sequences, and the presumed mechanism of simple prime editing reactions makes these larger DNA changes difficult by requiring long pegRNA reverse transcription templates. Site-specific DNA recombinase enzymes have the ability to perform several DNA transformations, including excision, inversion, integration, or exchange of large DNA sequences. However, challenges with reprogramming site-specific recombinases currently makes it challenging to apply for genome engineering and editing applications.

[1885] Presented herein is the development of twin prime editing (twinPE), which enables the deletion, substitution, or insertion of DNA sequence at endogenous genomic sites with high efficiencies in human cells. In addition to these changes, it is shown that twinPE can be used to integrate one or more recombinase recognition sites with high efficiency at targeted sites in the human genome, which can subsequently be used as substrates for site-specific serine recombinase enzymes that enable the targeted integration of genetic cargo or the targeted inversion of genomic DNA sequence.

### Results

[1886] Prime editing uses a prime editor protein comprising a fusion of a catalytically impaired Cas9 nickase and a wild-type (PE1) or engineered (PE2) MMLV reverse transcriptase enzyme, and a prime editing guide RNA (pegRNA) that both specifies the target genomic site and encodes the desired edit. Upon target site recognition, PE•pegRNA complexes nick the PAM-containing DNA strand and directly reverse transcribe the pegRNA's RT template into genomic DNA using the nicked strand as a primer. Following reverse transcription, the newly synthesized 3′ flap invades the adjacent DNA, to which it is largely homologous, to replace the redundant 5′ flap sequence. The opposing nonedited strand is then repaired using the edited DNA strand as a template. This proposed editing pathway therefore presents two opportunities at which cellular DNA repair can reject the desired edit and revert the DNA sequence to its original form.

[1887] It was predicted that bypassing potentially disfavored steps in DNA repair could allow prime editing to occur with increased efficiency and enable distinct classes of genome edits. Furthermore, a twin prime editing (twinPE) strategy that uses a pair of pegRNAs, each of which targets one or the other DNA strand and templates the synthesis of a 3′ flap DNA sequence that is complementary to the sequence templated by the other pegRNA was envisioned (FIG. 108A). It was hypothesized that if the newly synthesized DNA strands were highly dissimilar to the endogenous target site, the 3′ flaps would preferentially hybridize to create an intermediate possessing annealed 3′ overhangs of new DNA sequence and annealed 5′ overhangs of original DNA sequence (FIG. 108A). As both edited strands are synthesized by prime editor complexes, there is no requirement for invasion of the target site by edit-containing flap strands, or for the edit to be copied into the complementary DNA strand. Excision of the original DNA sequence (annealed 5′ overhangs), filling in of gaps by polymerases, and ligation of the pair of nicks would result in the replacement of the endogenous sequence between the nick sites with the paired 3′ flap sequences (FIG. 108A). Due to the flexibility in template design, the edit could in principle introduce a new DNA sequence, replace a portion of DNA sequence, or delete a portion of DNA sequence.

[1888] To evaluate the twinPE strategy, the HEK site 3 locus (previously referred to as HEK3) in HEK293T was targeted to replace 90 bp of endogenous sequence with a 38-bp Bxb1 attB attachment sequence (FIG. 108B). For each protospacer, three pegRNAs were designed with RT templates that contained 30, 34, or 38 nt of the 38-bp attB sequence (FIG. 108C). Pairwise combinations of these pegRNA are predicted to generate 3′ flaps with overlapping complementarity ranging from 22 to 38 bp (FIG. 108C). Excitingly, when both pegRNAs were delivered to cells along with PE2 in a plasmid DNA transfection, high efficiency of attB site insertion was observed, with some combinations of pegRNAs yielding >80% conversion to the desired product based on amplicon sequencing (FIG. 108C). A similar strategy for the insertion of the 50-bp Bxb1 attP attachment sequence achieved editing with efficiencies reaching up to 58% (FIG. 108C). Notably, it was not necessary for each pegRNA to encode the full insertion sequence, since partially overlapping complementary flaps enabled full-length attB or attP sequence incorporation. However, 3′ flaps with greater overlap led to slightly higher editing efficiencies and fewer indels for insertion of the Bxb1 attB and attP sequences at HEK site 3.

[1889] Next, twinPE was tested to determine if it could support the insertion of DNA sequences larger than that which has been demonstrated using the PE2 or PE3 systems. First, PE3-mediated insertions of FKBP12 coding sequence fragments ranging from 12 to 321 bp were examined Targeting the HEK site 3 locus with PE3, modest efficiencies were achieved for the shorter 12-bp and 36-bp insertions (31.8% and 17.3%, respectively), but very little desired product was observed for the 108-bp insertion (0.8%) and no full-length product for the 321-bp insertion (FIG. 109A). By contrast, twinPE enabled 16% insertion efficiency for the 108-bp fragment, amounting to a 20-fold improvement over PE3. Furthermore, 113-bp and 103-bp insertions containing paired Bxb1 recombinase sites were achieved with similar efficiencies (10.7% and 9.7%, respectively) at the CCRS locus (data not shown). These results illustrate the potential for larger sequence insertion using twinPE compared to PE3.

[1890] One potential application of the twinPE strategy is the replacement of exonic coding sequence with recoded DNA sequence that maintains the protein sequence and has the potential to correct any mutation between target twinPE-induced nick sites. To test this approach, the PAH gene was targeted, mutations in which cause the genetic metabolic disorder phenylketonuria (PKU). Recoding of portions of exon 4 and exon 7 was tested in PAH of wild type HEK293T cells, where corrective editing is detectable. By testing different flap overlap lengths and with the addition of evoPreQ1 motifs to the 3′ end of the pegRNAs, the desired sequence recoding was achieved with modest efficiencies reaching up to 9.4% average efficiency for a 64-bp recoding in exon 4, up to 22.7% average efficiency for a 46-bp recoding in exon 7, and up to 27.4% average efficiency for a 64-bp recoding in exon 7 (FIG. 109B). Based on mutations annotated in bioPKU database, twinPE editing of these regions collectively allow for the correction of distinct mutations implicated in PKU. Additional exons examined could also be recoded, albeit with lower efficiency (FIG. 112). These results demonstrate that twinPE could in principle be used to correct multiple mutations with a single pair of pegRNAs.

[1891] In addition to insertion and replacement of DNA sequences, twinPE should also be able to make precise deletion edits. Paired-nuclease deletion strategies generate deletions that span the two DSB sites and are thus restricted by PAM availability, and desired deletions are often accompanied by undesired indel byproducts. By contrast, twinPE has the potential to make deletions with greater flexibility and precision due to the lack of DSB generation and the ability to write in additional DNA sequence at the twinPE-induced nick sites. To assess twinPE for precise deletions, three strategies using paired pegRNAs were compared: a “single-anchor” twinPE strategy, a “hybrid-anchor” twinPE strategy, and the recently reported “PrimeDel” strategy (FIG. 109C). Each strategy differs in the sequence that is encoded in the complementary flaps, allowing for flexibility in the positioning of the deletion with respect to the nick sites.

[1892] Using the single-anchor strategy, 13-nt complementary flaps were used to delete 77 bp of sequence adjacent to one of the pegRNA-induced nick sites with 14.8% efficiency, and 34-nt complementary flaps were used to precisely excise 56 bp of sequence with 18.8% efficiency (FIG. 109D). Using the hybrid-anchor strategy, 64 bp were deleted between the pegRNA-induced nick sites such that the product retains 13 bp of sequence 3′ of each nick, with 11.7% efficiency (FIG. 109D). Finally, the PrimeDel strategy was tested for the deletion of 90 bp between the pegRNA-induced nick sites, which occurred with 40.4% efficiency (FIG. 109D). Of note, the PrimeDel strategy disrupts the PAM sequences on both strands, which likely increases efficiency while also decreasing indels. Editing efficiencies could be improved 1.5-fold to 2.5-fold by the addition of the evoPreQ1 motif the 3′ end of the pegRNAs, albeit with accompanied increases in indels in some cases (FIG. 109D). Together, these data show that twinPE offers a strategy for performing targeted deletions with high flexibility that does not rely on availability of perfectly positioned nuclease cut sites.

[1893] Lastly, a therapeutically relevant locus, DMD, was targeted to apply twinPE for larger deletions. Pathogenic DMD alleles, which are responsible for Duchenne muscular dystrophy, commonly contain large deletions in regions containing exons that result in frameshifted mRNA transcripts. Because production of full-length dystrophin protein without replacement of deleted exons can lead to partial rescue of protein function, disruption of a second exon that restores the reading frame has been proposed as a potential therapeutic strategy. Three twinPE deletion strategies were examined along with a previously reported Cas9 nuclease deletion strategy for excising exon 51 in DMD. Using single-anchor twinPE deletion approaches, 14.4% to 24% efficiency was observed for the deletion of a 780-bp sequence containing exon 51 in DMD (FIG. 109E). While the paired Cas9 nuclease strategy achieved higher deletion efficiency (averaging 49.8%) compared to the twinPE strategies (averaging 14% to 24%), paired Cas9 nuclease-mediated deletion was also accompanied by much higher indel levels (33% desired deletion with indels, 11% indels without the desired deletion) compared to twinPE (1% to 12% total indels) (FIG. 109E). Exon 51 of DMD could also be excised using alternative spacer pairs that generate a 627-bp deletion with the PrimeDel strategy (28.8% average efficiency) or a 590-bp deletion with the single-anchor twinPE strategy (26.4% average efficiency), or by using twinPE to replace a 589-bp sequence with a 38-bp Bxb1 attB sequence (up to 40.4% average efficiency) (FIG. 109E). These experiments show that twinPE and PrimeDel are capable of generating large deletions at therapeutically relevant loci in human cells with superior product purity compared to paired Cas9 nuclease strategies, albeit with lower average efficiencies.

Targeted DNA Integration at Safe Harbor Loci with TwinPE and Bxb1 Integrase

[1894] Although twinPE is able to perform larger insertion edits than PE3, the upper limits of sequence insertion size were still not sufficient to support the integration of gene-sized DNA fragments. Therefore, having successfully inserted Bxb1 attachment sequences into endogenous human genomic sites with high efficiency using twinPE, twinPE was combined twith serine recombinases for the site-specific integration of DNA cargo. To identify locations for DNA cargo integration, the twinPE-mediated insertion of Bxb1 attB and attP attachment sequences at established safe harbor loci in HEK293T cells. 32 spacer pairs targeting the AAVS1 locus were screened for insertion of the 50-bp Bxb1 attP sequence (data not shown). Of the evaluated spacer pairs, optimal pegRNAs for 18 out of 32 spacer combinations achieved >50% correct insertion efficiency by amplicon sequencing (FIG. 110A). Additionally, 19 spacer pairs targeting the CCR5 locus were screened for insertion of the 38-bp Bxb1 attB sequence (data not shown), of which 6 spacer pairs achieved >50% desired editing efficiency by amplicon sequencing (FIG. 110B). These results demonstrate that twinPE can be used to insert recombinase attachment sequences at safe harbor loci in human cells with high efficiency.

[1895] Next, twinPE-incorporated Bxb1 attB and attP sequences were examined to determine if they could serve as target sites for the integration of plasmid DNA cargo harboring partner Bxb1 attachment sites. First, twinPE was used to generate single-cell clones bearing homozygous attB site insertions at the CCR5 locus (data not shown). Transfection of this clonal cell line with a plasmid expressing Bxb1 recombinase and a 5.6-kB attP-containing donor DNA plasmid yielded 12-17% knock-in at the target site as measured by ddPCR (FIG. 113), consistent with previously reported Bxb1 integration efficiencies. Encouraged by these results, twinPE-mediated attachment site insertion and BxB1-mediated DNA donor integration were explored to determine if they could be achieved in a single transfection step. Excitingly, transfection of HEK293T cells with plasmids encoding PE2, both pegRNAs, BxB1, and donor DNA resulted in 1.4-6.8% knock-in efficiency as measured by ddPCR (FIG. 110C). The expected junction sequences containing the expected attL and attR recombination products were confirmed by amplicon sequencing, with product purities ranging from 71-95% (FIG. 114).

[1896] In an effort to improve the “one-pot” knock-in efficiency, the twinPE-mediated incorporation of either attB or attP attachment sites, the canonical (GT) Bxb1 core sequence, an alternative (GA) Bxbl core sequence, and varying flap overlap lengths were tested. It was found that the incorporation of the attB site with twinPE performed better than the incorporation of the attP site for one-pot knock-in transfections (3.3% vs. 0.5% knock-in, FIG. 110D). In addition, it was observed that insertions of attachment sites with the canonical GT core sequence generally led to higher knock-in efficiencies than insertions of attachment sites with the alternative GA sequence (3.3% vs. 0% in the attB context, FIG. 110D). Of note, however, the canonical and alternative core sequences allow for orthogonal recombination with corresponding attP attachment sites. Reducing overlap between pegRNA-encoded recombinase sequences also improved knock-in efficiency, from 3.3% with 38 base pairs of overlap to 5.5% with 20 base pairs of overlap when inserting attB (FIG. 110D), possibly due to the reduced extent of attachment sequence within the pegRNA-expressing plasmid DNA sequence. Although similar twinPE efficiency was observed across overlap lengths, recombination between donor DNA and pegRNA plasmid was reduced (FIGS. 115A-115B).

[1897] Next, donor integration was evaluated at the ALB locus, which can be coopted for therapeutic protein secretion from hepatocytes. Albumin is actively secreted by the liver and constitutes approximately 60% of human plasma proteins. Therefore, therapeutic transgene integration at the ALB locus in a relatively small percentage of hepatocytes could achieve therapeutic levels of protein expression for many diseases. A strategy targeting intron 1 of ALB was devised, wherein Bxb1 would mediate the integration of circular DNA containing a splice acceptor sequence followed by the cDNA for a protein of interest. Integration would in principle allow for splicing of the albumin secretion signal, encoded in exon 1, to the therapeutic transgene coding sequence. First, pegRNA pairs were screened for the insertion of the Bxb1 attB sequence within intron 1 of ALB. After screening pegRNA pairs, a spacer combination that achieved 43% correct insertion of the attB sequence by amplicon sequencing was identified (FIG. 110E). Single transfection knock-in at this locus was achieved with 1.3% efficiency in HEK293T (FIG. 110F). In Huh7 cells, 34% correct insertion of the attB sequence, with single transfection knock-in efficiency of 2.6% was observed. Interestingly, knock-in at ALB in Huh7 was more efficient than knock-in at CCR5 (2.6% vs. 1.1%), despite CCR5 knock-in being more efficient than ALB knock-in in HEK293T cells.

TABLE 14
DNA donor sequences used in this Example

| | | SEQ |
|---|---|---|
| | | ID |
| DNA donor | Sequence | NO: |
| attB_ | gatgccagctcattcctcccactcatgatctatagatcccccgg | 4282 |
| Puro_GA | gctgcaggaattctacccactctgtcgataccccaccgagaccc | |
| donor | cattggggccaatacgcccgcgtttcttccttttccccacccca | |
| DNA: | ccccccaagttcgggtgaaggcccagggctcgcagccaacgtc | |
| | ggggcggcaagcttacatcgagatcccggcttgtcgacgacgg | |
| | cggactccgtcgtcaggatcatccgtgagcaagggcgagga | |
| | gctgttcaccggggtggtgcccatcctggtcgagctggacgg | |
| | cgacgtaaacggccacaagttcagcgtgtccggcgagggcga | |
| | gggcgatgccacctacggcaagctgaccctgaagttcatctgc | |
| | accaccggcaagctgcccgtgccctggcccaccctcgtgacc | |
| | accctgacctacggcgtgcagtgcttcagccgctaccccgac | |
| | cacatgaagcagcacgacttcttcaagtccgccatgcccgaag | |
| | gctacgtccaggagcgcaccatcttcttcaaggacgacggca | |
| | actacaagacccgcgccgaggtgaagttcgagggcgacaccc | |
| | tggtgaaccgcatcgagctgaagggcatcgacttcaaggagg | |
| | acggcaacatcctggggcacaagctggagtacaactacaaca | |
| | gccacaacgtctatatcatggccgacaagcagaagaacggcat | |
| | caaggtgaacttcaagatccgccacaacatcgaggacggca | |
| | gcgtgcagctcgccgaccactaccagcagaacacccccatcgg | |
| | cgacggccccgtgctgctgcccgacaaccactacctgagca | |
| | cccagtccgccctgagcaaagaccccaacgagaagcgcgatc | |
| | acatggtcctgctggagttcgtgaccgccgccgggatcactct | |
| | cggcatggacgagctgtacaagagcggcctgaggagcagag | |
| | cccaggcgagcaacagcgccgtggacgccaccatgggcga | |
| | tcgcccgggaattgactagtgcggccgcctaggatccatgccg | |
| | atagcgttggttgagtggataaccgtattaccgccaagcttatg | |
| | catgtgcccgtcagtgggcagagcgcacatcgcccacagtcc | |
| | ccgagaagttggggggaggggtcggcaattgaaccggtgcct | |
| | agagaaggtggcgcggggtaaactgggaaagtgatgtcgtgta | |
| | ctggctccgcctttttcccgagggtgggggagaaccgtatata | |
| | agtgcagtagtcgccgtgaacgttctttttcgcaacgggtttg | |
| | ccgccagaacacaggtaagtgccgtgtgtggttcccgcgggcct | |
| | ggcctctttacgggttatggcccttgcgtgccttgaattacttcc | |
| | acctggctgcagtacgtgattcttgatcccgagcttcgggttgga | |
| | agtgggtgggagagttcgaggccttgcgcttaaggagcccctt | |
| | cgcctcgtgcttgagttgaggcctggcctgggcgctggggcc | |
| | gccgcgtgcgaatctggtggcaccttcgcgcctgtctcgctgctt | |
| | tcgataagtctctagccatttaaaatttttgatgacctgctgcga | |
| | cgctttttttctggcaagatagtcttgtaaatgcgggccaagatc | |
| | tgcacactggtatttcggtttttggggccgcgggcggcgacggg | |
| | gcccgtgcgtcccagcgcacatgttcggcgaggcggggcct | |
| | gcgagcgcggccaccgagaatcggacgggggtagtctcaag | |
| | ctggccggcctgctctggtgcctggcctcgcgccgccgtgtat | |
| | cgccccgccctgggcggcaaggctggcccggtcggcaccag | |
| | ttgcgtgagcggaaagatggccgcttcccggccctgctgca | |
| | gggagctcaaaatggaggacgcggcgctcgggagagcgggc | |
| | gggtgagtcacccacacaaaggaaaagggcctttccgtcctca | |
| | gccgtcgcttcatgtgactccacggagtaccgggcgccgtcca | |
| | ggcacctcgattagttctcgcgcttttggagtacgtcgtctttag | |
| | gttggggggaggggttttatgcgatggagtttccccacactgagt | |
| | gggtggagactgaagttaggccagcttggcacttgatgtaattct | |
| | ccttggaatttgccctttttgagtttggatcttggttcattctca | |
| | agcctcagacagtggttcaaagtttttttcttccatttcaggtgt | |
| | cgtgagctagcccaccatgaccgagtacaagcccacggtgcgcct | |
| | cgccacccgcgacgacgtcccccgggccgtacgcaccctcgc | |
| | cgccgcgttcgccgactaccccgccacgcgccacaccgtcg | |
| | acccggaccgccacatcgagcgggtcaccgagctgcaagaac | |
| | tcttcctcacgcgcgtcgggctcgacatcggcaaggtgtggg | |
| | tcgcggacgacggcgccgcggtggcggtctggaccacgccg | |
| | gagagcgtcgaagcgggggcggtgttcgccgagatcggcc | |
| | cgcgcatggccgagttgagcggttcccggctggccgcgcag | |
| | caacagatggaaggcctcctggcgccgcaccggcccaagga | |
| | gcccgcgtggttcctggccaccgtcggcgtctcgcccgacc | |
| | accagggcaagggtctgggcagcgccgtcgtgctccccggagt | |
| | ggaggcggccgagcgcgccggggtgcccgccttcctggaga | |
| | cctccgcgccccgcaacctccccttctacgagcggctcggctt | |
| | caccgtcaccgccgacgtcgaggtgcccgaaggaccgcgcacc | |
| | tggtgcatgacccgcaagcccggtgccggatcgggagag | |
| | ggcagaggaagtctgctaacatgcggtgacgtcgaggagaa | |
| | tcctggcccaccggtcgccaccagcgagctgattaaggagaac | |
| | atgcacatgaagctgtacatggagggcaccgtggacaaccat | |
| | cacttcaagtgcacatccgagggcgaaggcaagccctacgag | |
| | ggcacccagaccatgagaatcaaggtggtcgagggcggccctc | |
| | tccccttcgccttcgacatcctggctactagcttcctctacggc | |
| | agcaagaccttcatcaaccacacccagggcatccccgacttct | |
| | tcaagcagtccttccctgagggcttcacatgggagagagtcac | |
| | cacatacgaagacgggggcgtgctgaccgctacccaggacac | |
| | cagcctccaggacggctgcctcatctacaacgtcaagatcag | |
| | aggggtgaacttcacatccaacggccctgtgatgcagaagaa | |
| | aacactcggctgggaggccttcaccgagacgctgtaccccgct | |
| | gacggcggcctggaaggcagaaacgacatggccctgaagctc | |
| | gtgggcgggagccatctgatcgcaaacatcaagaccacatat | |
| | agatccaagaaacccgctaagaacctcaagatgcctggcgtct | |
| | actatgtggactacagactggaaagaatcaaggaggccaaca | |
| | acgagacctacgtcgagcagcacgaggtggcagtggccagatac | |
| | tgcgacctccctagcaaactggggcacaagcttaattaagaatt | |
| | ctctagaggatccagacatgataagatacattgatgagtttggac | |
| | aaaccacaactagaatgcagtgaaaaaaatgctttatttgtgaaa | |
| | tttgtgatgctattgctttatttgtaaccattataagctgcaata | |
| | aacaagttaacaacaacaattgcattcattttatgtttcaggttc | |
| | agggggaggtgtgggaggttttttaaagcaagtaaaacctctaca | |
| | aatgtggtatggctgattatgatcctgcaagcctcgtcgccgcgg | |
| | tttattctgttgacaattaatcatcggcatagtatatcggcatag | |
| | tataatacgacaaggtgaggaactaaaccatgggatcggccattg | |
| | aacaagatggattgcacgcaggttctccggccgcttgggtgga | |
| | gaggctattcggctatgactgggcacaacagacgatcggctg | |
| | ctctgatgccgccgtgttccggctgtcagcgcaggggcgcccg | |
| | gttctttttgtcaagaccgacctgtccggtgccctgaatgaact | |
| | gcaggacgaggcagcgcggctatcgtggctggccacgacggg | |
| | cgttccttgcgcagctgtgctcgacgttgtcactgaagcggg | |
| | aagggactggctgctattgggcgaagtgccggggcaggatctcc | |
| | tgtcatctcaccttgctcctgccgagaaagtatccatcatggc | |
| | tgatgcaatgcggcggctgcatacgcttgatccggctacctgc | |
| | ccattcgaccaccaagcgaaacatcgcatcgagcgagcacgta | |
| | ctcggatggaagccggtcttgtcgatcaggatgatctggacga | |
| | agagcatcaggggctcgcgccagccgaactgttcgccaggct | |
| | caaggcgcgcatgcccgacggcgaggatctcgtcgtgaccca | |
| | tggcgatgcctgcttgccgaatatcatggtggaaaatggccgc | |
| | ttttctggattcatcgactgtggccggctgggtgtggcggaccg | |
| | ctatcaggacatagcgttggctacccgtgatattgctgaagagc | |
| | ttggcggcgaatgggctgaccgcttcctcgtgctttacggtatcg | |
| | ccgcccccgattcgcagcgcatcgccttctatcgccttcttgac | |
| | gagttcttctgagcgggactctggggttcgaataaagaccgacc | |
| | aagcgacgtctgagagctccctggcgaattcggtaccaataaa | |
| | agagctttattttcatgatctgtgtgttggtttttggccgcgttg | |
| | ctggcgtttttccataggctccgcccccctgacgagcatcacaaa | |
| | aatcgacgctcaagtcagaggtggcgaaacccgacaggactat | |
| | aaagataccaggcgtttccccctggaagctccctcgtgcgctc | |
| | tcctgttccgaccctgccgcttaccggatacctgtccgcctttct | |
| | cccttcgggaagcgtggcgctttctcatagctcacgctgtaggta | |
| | tctcagttcggtgtaggtcgttcgctccaagctgggctgtgtgc | |
| | acgaaccccccgttcagcccgaccgctgcgccttatccggtaac | |
| | tatcgtcttgagtccaacccggtaagacacgacttatcgccact | |
| | ggcagcagccactggtaacaggattagcagagcgaggtatgta | |
| | ggcggtgctacagagttcttgaagtggtggcctaactacggct | |
| | acactagaagaacagtatttggtatctgcgctctgctgaagccag | |
| | ttaccttcggaaaaagagttggtagctcttgatccggcaaacaaa | |
| | ccaccgctggtagcggtggtttttttgtttgcaagcagcagatt | |
| | acgcgcagaaaaaaaggatctcaagaagatcctttgatctttt | |
| | ctagtgtgcg | |
| attB_Puro | gatgccagctcattcctcccactcatgatctatagatcccccgg | 4283 |
| donor DNA: | gctgcaggaattctacccactctgtcgataccccaccgagaccc | |
| | cattggggccaatacgcccgcgtttcttccttttccccacccc | |
| | accccccaagttcgggtgaaggcccagggctcgcagccaacgtc | |
| | ggggcggcaagcttacatcgagatcccggcttgtcgacgacg | |
| | gcggtctccgtcgtcaggatcatccgtgagcaagggcgagga | |
| | gctgttcaccggggtggtgcccatcctggtcgagctggacggc | |
| | gacgtaaacggccacaagttcagcgtgtccggcgagggcga | |
| | gggcgatgccacctacggcaagctgaccctgaagttcatctg | |
| | caccaccggcaagctgcccgtgccctggcccaccctcgtgacc | |
| | accctgacctacggcgtgcagtgcttcagccgctaccccgacc | |
| | acatgaagcagcacgacttcttcaagtccgccatgcccgaag | |
| | gctacgtccaggagcgcaccatcttcttcaaggacgacggca | |
| | actacaagacccgcgccgaggtgaagttcgagggcgacaccc | |
| | tggtgaaccgcatcgagctgaagggcatcgacttcaaggag | |
| | gacggcaacatcctggggcacaagctggagtacaactacaaca | |
| | gccacaacgtctatatcatggccgacaagcagaagaacggca | |
| | tcaaggtgaacttcaagatccgccacaacatcgaggacggca | |
| | gcgtgcagctcgccgaccactaccagcagaacacccccatcg | |
| | gcgacggccccgtgctgctgcccgacaaccactacctgagca | |
| | cccagtccgccctgagcaaagaccccaacgagaagcgcgatc | |
| | acatggtcctgctggagttcgtgaccgccgccgggatcactct | |
| | cggcatggacgagctgtacaagagcggcctgaggagcaga | |
| | gcccaggcgagcaacagcgccgtggacgccaccatgggcga | |
| | tcgcccgggaattgactagtgcggccgcctaggatccatgccg | |
| | atagcgttggttgagtggataaccgtattaccgccaagcttatg | |
| | catgtgcccgtcagtgggcagagcgcacatcgcccacagtcc | |
| | ccgagaagttggggggaggggtcggcaattgaaccggtgcct | |
| | agagaaggtggcgcggggtaaactgggaaagtgatgtcgtgta | |
| | ctggctccgcctttttcccgagggtgggggagaaccgtatata | |
| | agtgcagtagtcgccgtgaacgttctttttcgcaacgggtttg | |
| | ccgccagaacacaggtaagtgccgtgtgtggttcccgcgggcct | |
| | ggcctctttacgggttatggcccttgcgtgccttgaattacttcc | |
| | acctggctgcagtacgtgattcttgatcccgagcttcgggttgga | |
| | agtgggtgggagagttcgaggccttgcgcttaaggagcccctt | |
| | cgcctcgtgcttgagttgaggcctggcctgggcgctggggcc | |
| | gccgcgtgcgaatctggtggcaccttcgcgcctgtctcgctgctt | |
| | tcgataagtctctagccatttaaaatttttgatgacctgctgcga | |
| | cgctttttttctggcaagatagtcttgtaaatgcgggccaagat | |
| | ctgcacactggtatttcggtttttggggccgcgggcggcgacggg | |
| | gcccgtgcgtcccagcgcacatgttcggcgaggcggggcctg | |
| | cgagcgcggccaccgagaatcggacgggggtagtctcaag | |
| | ctggccggcctgctctggtgcctggcctcgcgccgccgtgta | |
| | tcgccccgccctgggcggcaaggctggcccggtcggcaccag | |
| | ttgcgtgagcggaaagatggccgcttcccggccctgctgca | |
| | gggagctcaaaatggaggacgcggcgctcgggagagcgggc | |
| | gggtgagtcacccacacaaaggaaaagggcctttccgtcctca | |
| | gccgtcgcttcatgtgactccacggagtaccgggcgccgtcc | |
| | aggcacctcgattagttctcgcgcttttggagtacgtcgtcttta | |
| | ggttggggggaggggttttatgcgatggagtttccccacactgag | |
| | tgggtggagactgaagttaggccagcttggcacttgatgtaattc | |
| | tccttggaatttgccctttttgagtttggatcttggttcattctc | |
| | aagcctcagacagtggttcaaagtttttttcttccatttcaggtg | |
| | tcgtgagctagcccaccatgaccgagtacaagcccacggtgcgcc | |
| | tcgccacccgcgacgacgtcccccgggccgtacgcaccctcgc | |
| | cgccgcgttcgccgactaccccgccacgcgccacaccgtcg | |
| | acccggaccgccacatcgagcgggtcaccgagctgcaagaac | |
| | tcttcctcacgcgcgtcgggctcgacatcggcaaggtgtggg | |
| | tcgcggacgacggcgccgcggtggcggtctggaccacgccg | |
| | gagagcgtcgaagcgggggcggtgttcgccgagatcggcc | |
| | cgcgcatggccgagttgagcggttcccggctggccgcgcagc | |
| | aacagatggaaggcctcctggcgccgcaccggcccaagga | |
| | gcccgcgtggttcctggccaccgtcggcgtctcgcccgacca | |
| | ccagggcaagggtctgggcagcgccgtcgtgctccccggagt | |
| | ggaggcggccgagcgcgccggggtgcccgccttcctggagac | |
| | ctccgcgccccgcaacctccccttctacgagcggctcggctt | |
| | caccgtcaccgccgacgtcgaggtgcccgaaggaccgcgca | |
| | cctggtgcatgacccgcaagcccggtgccggatcgggagag | |
| | ggcagaggaagtctgctaacatgcggtgacgtcgaggagaat | |
| | cctggcccaccggtcgccaccagcgagctgattaaggagaac | |
| | atgcacatgaagctgtacatggagggcaccgtggacaacca | |
| | tcacttcaagtgcacatccgagggcgaaggcaagccctacgag | |
| | ggcacccagaccatgagaatcaaggtggtcgagggcggccctc | |
| | tccccttcgccttcgacatcctggctactagcttcctctacggc | |
| | agcaagaccttcatcaaccacacccagggcatccccgacttct | |
| | tcaagcagtccttccctgagggcttcacatgggagagagtcac | |
| | cacatacgaagacgggggcgtgctgaccgctacccaggaca | |
| | ccagcctccaggacggctgcctcatctacaacgtcaagatcag | |
| | aggggtgaacttcacatccaacggccctgtgatgcagaagaa | |
| | aacactcggctgggaggccttcaccgagacgctgtaccccgct | |
| | gacggcggcctggaaggcagaaacgacatggccctgaagctc | |
| | gtgggcgggagccatctgatcgcaaacatcaagaccacatat | |
| | agatccaagaaacccgctaagaacctcaagatgcctggcgtc | |
| | tactatgtggactacagactggaaagaatcaaggaggccaaca | |
| | acgagacctacgtcgagcagcacgaggtggcagtggccagatac | |
| | tgcgacctccctagcaaactggggcacaagcttaattaagaatt | |
| | ctctagaggatccagacatgataagatacattgatgagtttgga | |
| | caaaccacaactagaatgcagtgaaaaaaatgctttatttgtgaa | |
| | atttgtgatgctattgctttatttgtaaccattataagctgcaat | |
| | aaacaagttaacaacaacaattgcattcattttatgtttcaggtt | |
| | cagggggaggtgtgggaggttttttaaagcaagtaaaacctctac | |
| | aaatgtggtatggctgattatgatcctgcaagcctcgtcgccgcg | |
| | gtttattctgttgacaattaatcatcggcatagtatatcggcata | |
| | gtataatacgacaaggtgaggaactaaaccatgggatcggccatt | |
| | gaacaagatggattgcacgcaggttctccggccgcttgggtgga | |
| | gaggctattcggctatgactgggcacaacagacgatcggctg | |
| | ctctgatgccgccgtgttccggctgtcagcgcaggggcgcccg | |
| | gttctttttgtcaagaccgacctgtccggtgccctgaatgaact | |
| | gcaggacgaggcagcgcggctatcgtggctggccacgacggg | |
| | cgttccttgcgcagctgtgctcgacgttgtcactgaagcggg | |
| | aagggactggctgctattgggcgaagtgccggggcaggatctc | |
| | ctgtcatctcaccttgctcctgccgagaaagtatccatcatggc | |
| | tgatgcaatgcggcggctgcatacgcttgatccggctacctgc | |
| | ccattcgaccaccaagcgaaacatcgcatcgagcgagcacgta | |
| | ctcggatggaagccggtcttgtcgatcaggatgatctggacg | |
| | aagagcatcaggggctcgcgccagccgaactgttcgccaggct | |
| | caaggcgcgcatgcccgacggcgaggatctcgtcgtgacccat | |
| | ggcgatgcctgcttgccgaatatcatggtggaaaatggccgc | |
| | ttttctggattcatcgactgtggccggctgggtgtggcggaccg | |
| | ctatcaggacatagcgttggctacccgtgatattgctgaagagc | |
| | ttggcggcgaatgggctgaccgcttcctcgtgctttacggtatc | |
| | gccgcccccgattcgcagcgcatcgccttctatcgccttcttgac | |
| | gagttcttctgagcgggactctggggttcgaataaagaccgac | |
| | caagcgacgtctgagagctccctggcgaattcggtaccaataaa | |
| | agagctttattttcatgatctgtgtgttggtttttggccgcgttg | |
| | ctggcgtttttccataggctccgcccccctgacgagcatcacaaa | |
| | aatcgacgctcaagtcagaggtggcgaaacccgacaggactat | |
| | aaagataccaggcgtttccccctggaagctccctcgtgcgctc | |
| | tcctgttccgaccctgccgcttaccggatacctgtccgcctttct | |
| | cccttcgggaagcgtggcgctttctcatagctcacgctgtaggta | |
| | tctcagttcggtgtaggtcgttcgctccaagctgggctgtgtgc | |
| | acgaaccccccgttcagcccgaccgctgcgccttatccggtaac | |
| | tatcgtcttgagtccaacccggtaagacacgacttatcgccact | |
| | ggcagcagccactggtaacaggattagcagagcgaggtatgta | |
| | ggcggtgctacagagttcttgaagtggtggcctaactacggcta | |
| | cactagaagaacagtatttggtatctgcgctctgctgaagccag | |
| | ttaccttcggaaaaagagttggtagctcttgatccggcaaacaa | |
| | accaccgctggtagcggtggtttttttgtttgcaagcagcagatt | |
| | acgcgcagaaaaaaaggatctcaagaagatcctttgatctttt | |
| | ctagtgtgcg | |
| attP_ | gatgccagctcattcctcccactcatgatctatagatcccccgg | 4284 |
| Puro_GA | gctgcaggaattctacccactctgtcgataccccaccgagaccc | |
| donor | cattggggccaatacgcccgcgtttcttccttttccccacccc | |
| DNA: | accccccaagttcgggtgaaggcccagggctcgcagccaacgtc | |
| | ggggcggcaagcttacatcgagatcccggtttgtctggtcaa | |
| | ccaccgcggactcagtggtgtacggtacaaaccccgtgagcaa | |
| | gggcgaggagctgttcaccggggtggtgcccatcctggtcga | |
| | gctggacggcgacgtaaacggccacaagttcagcgtgtccgg | |
| | cgagggcgagggcgatgccacctacggcaagctgaccctgaa | |
| | gttcatctgcaccaccggcaagctgcccgtgccctggcccac | |
| | cctcgtgaccaccctgacctacggcgtgcagtgcttcagccgc | |
| | taccccgaccacatgaagcagcacgacttcttcaagtccgcca | |
| | tgcccgaaggctacgtccaggagcgcaccatcttcttcaagg | |
| | acgacggcaactacaagacccgcgccgaggtgaagttcgagg | |
| | gcgacaccctggtgaaccgcatcgagctgaagggcatcgac | |
| | ttcaaggaggacggcaacatcctggggcacaagctggagtac | |
| | aactacaacagccacaacgtctatatcatggccgacaagcag | |
| | aagaacggcatcaaggtgaacttcaagatccgccacaacatcg | |
| | aggacggcagcgtgcagctcgccgaccactaccagcagaac | |
| | acccccatcggcgacggccccgtgctgctgcccgacaaccac | |
| | tacctgagcacccagtccgccctgagcaaagaccccaacgag | |
| | aagcgcgatcacatggtcctgctggagttcgtgaccgccgcc | |
| | gggatcactctcggcatggacgagctgtacaagagcggcct | |
| | gaggagcagagcccaggcgagcaacagcgccgtggacgcca | |
| | ccatgggcgatcgcccgggaattgactagtgcggccgcctag | |
| | gatccatgccgatagcgttggttgagtggataaccgtattaccg | |
| | ccaagcttatgcatgtgcccgtcagtgggcagagcgcacatc | |
| | gcccacagtccccgagaagttggggggaggggtcggcaattg | |
| | aaccggtgcctagagaaggtggcgcggggtaaactgggaaag | |
| | tgatgtcgtgtactggctccgcctttttcccgagggtggggga | |
| | gaaccgtatataagtgcagtagtcgccgtgaacgttctttttcg | |
| | caacgggtttgccgccagaacacaggtaagtgccgtgtgtggtt | |
| | cccgcgggcctggcctctttacgggttatggcccttgcgtgcct | |
| | tgaattacttccacctggctgcagtacgtgattcttgatcccgag | |
| | cttcgggttggaagtgggtgggagagttcgaggccttgcgctt | |
| | aaggagccccttcgcctcgtgcttgagttgaggcctggcctgg | |
| | gcgctggggccgccgcgtgcgaatctggtggcaccttcgcgcctg | |
| | tctcgctgctttcgataagtctctagccatttaaaatttttgatg | |
| | acctgctgcgacgctttttttctggcaagatagtcttgtaaatgc | |
| | gggccaagatctgcacactggtatttcggtttttggggccgcggg | |
| | cggcgacggggcccgtgcgtcccagcgcacatgttcggcg | |
| | aggcggggcctgcgagcgcggccaccgagaatcggacgggg | |
| | gtagtctcaagctggccggcctgctctggtgcctggcctcgc | |
| | gccgccgtgtatcgccccgccctgggcggcaaggctggcccg | |
| | gtcggcaccagttgcgtgagcggaaagatggccgcttcccg | |
| | gccctgctgcagggagctcaaaatggaggacgcggcgctcgg | |
| | gagagcgggcgggtgagtcacccacacaaaggaaaagggcct | |
| | ttccgtcctcagccgtcgcttcatgtgactccacggagtaccg | |
| | ggcgccgtccaggcacctcgattagttctcgcgcttttggagtac | |
| | gtcgtctttaggttggggggaggggttttatgcgatggagtttcc | |
| | ccacactgagtgggtggagactgaagttaggccagcttggcactt | |
| | gatgtaattctccttggaatttgccctttttgagtttggatcttg | |
| | gttcattctcaagcctcagacagtggttcaaagtttttttcttcc | |
| | atttcaggtgtcgtgagctagcccaccatgaccgagtacaagccc | |
| | acggtgcgcctcgccacccgcgacgacgtcccccgggccgt | |
| | acgcaccctcgccgccgcgttcgccgactaccccgccacgcgc | |
| | cacaccgtcgacccggaccgccacatcgagcgggtcaccgag | |
| | ctgcaagaactcttcctcacgcgcgtcgggctcgacatcggc | |
| | aaggtgtgggtcgcggacgacggcgccgcggtggcggtctg | |
| | gaccacgccggagagcgtcgaagcgggggcggtgttcgcc | |
| | gagatcggcccgcgcatggccgagttgagcggttcccggctg | |
| | gccgcgcagcaacagatggaaggcctcctggcgccgcaccg | |
| | gcccaaggagcccgcgtggttcctggccaccgtcggcgtctc | |
| | gcccgaccaccagggcaagggtctgggcagcgccgtcgtgc | |
| | tccccggagtggaggcggccgagcgcgccggggtgcccgcct | |
| | tcctggagacctccgcgccccgcaacctccccttctacgag | |
| | cggctcggcttcaccgtcaccgccgacgtcgaggtgcccga | |
| | aggaccgcgcacctggtgcatgacccgcaagcccggtgccgg | |
| | atcgggagagggcagaggaagtctgctaacatgcggtgacg | |
| | tcgaggagaatcctggcccaccggtcgccaccagcgagctga | |
| | ttaaggagaacatgcacatgaagctgtacatggagggcaccg | |
| | tggacaaccatcacttcaagtgcacatccgagggcgaaggcaa | |
| | gccctacgagggcacccagaccatgagaatcaaggtggtcgag | |
| | ggcggccctctccccttcgccttcgacatcctggctactagct | |
| | tcctctacggcagcaagaccttcatcaaccacacccagggcat | |
| | ccccgacttcttcaagcagtccttccctgagggcttcacatggg | |
| | agagagtcaccacatacgaagacgggggcgtgctgaccgct | |
| | acccaggacaccagcctccaggacggctgcctcatctacaacg | |
| | tcaagatcagaggggtgaacttcacatccaacggccctgtgat | |
| | gcagaagaaaacactcggctgggaggccttcaccgagacgct | |
| | gtaccccgctgacggcggcctggaaggcagaaacgacatggc | |
| | cctgaagctcgtgggcgggagccatctgatcgcaaacatca | |
| | agaccacatatagatccaagaaacccgctaagaacctcaagat | |
| | gcctggcgtctactatgtggactacagactggaaagaatcaag | |
| | gaggccaacaacgagacctacgtcgagcagcacgaggtggcagt | |
| | ggccagatactgcgacctccctagcaaactggggcacaagctt | |
| | aattaagaattctctagaggatccagacatgataagatacattga | |
| | tgagtttggacaaaccacaactagaatgcagtgaaaaaaatgctt | |
| | tatttgtgaaatttgtgatgctattgctttatttgtaaccattat | |
| | aagctgcaataaacaagttaacaacaacaattgcattcattttat | |
| | gtttcaggttcagggggaggtgtgggaggttttttaaagcaagt | |
| | aaaacctctacaaatgtggtatggctgattatgatcctgcaagcc | |
| | tcgtcgccgcggtttattctgttgacaattaatcatcggcatag | |
| | tatatcggcatagtataatacgacaaggtgaggaactaaaccatg | |
| | ggatcggccattgaacaagatggattgcacgcaggttctccgg | |
| | ccgcttgggtggagaggctattcggctatgactgggcacaaca | |
| | gacgatcggctgctctgatgccgccgtgttccggctgtcagcg | |
| | caggggcgcccggttctttttgtcaagaccgacctgtccggtgc | |
| | cctgaatgaactgcaggacgaggcagcgcggctatcgtggct | |
| | ggccacgacgggcgttccttgcgcagctgtgctcgacgttgtc | |
| | actgaagcgggaagggactggctgctattgggcgaagtgccgg | |
| | ggcaggatctcctgtcatctcaccttgctcctgccgagaaagt | |
| | atccatcatggctgatgcaatgcggcggctgcatacgcttgat | |
| | ccggctacctgcccattcgaccaccaagcgaaacatcgcatcga | |
| | gcgagcacgtactcggatggaagccggtcttgtcgatcagga | |
| | tgatctggacgaagagcatcaggggctcgcgccagccgaact | |
| | gttcgccaggctcaaggcgcgcatgcccgacggcgaggatctc | |
| | gtcgtgacccatggcgatgcctgcttgccgaatatcatggtg | |
| | gaaaatggccgcttttctggattcatcgactgtggccggctgg | |
| | gtgtggcggaccgctatcaggacatagcgttggctacccgtgat | |
| | attgctgaagagcttggcggcgaatgggctgaccgcttcctcgt | |
| | gctttacggtatcgccgcccccgattcgcagcgcatcgccttct | |
| | atcgccttcttgacgagttcttctgagcgggactctggggttcg | |
| | aataaagaccgaccaagcgacgtctgagagctccctggcgaat | |
| | tcggtaccaataaaagagctttattttcatgatctgtgtgttggt | |
| | ttttggccgcgttgctggcgtttttccataggctccgcccccctg | |
| | acgagcatcacaaaaatcgacgctcaagtcagaggtggcgaaac | |
| | ccgacaggactataaagataccaggcgtttccccctggaagct | |
| | ccctcgtgcgctctcctgttccgaccctgccgcttaccggatacc | |
| | tgtccgcctttctcccttcgggaagcgtggcgctttctcatagct | |
| | cacgctgtaggtatctcagttcggtgtaggtcgttcgctccaa | |
| | gctgggctgtgtgcacgaaccccccgttcagcccgaccgctgcg | |
| | ccttatccggtaactatcgtcttgagtccaacccggtaagaca | |
| | cgacttatcgccactggcagcagccactggtaacaggattagca | |
| | gagcgaggtatgtaggcggtgctacagagttcttgaagtggtgg | |
| | cctaactacggctacactagaagaacagtatttggtatctgcg | |
| | ctctgctgaagccagttaccttcggaaaaagagttggtagctctt | |
| | gatccggcaaacaaaccaccgctggtagcggtggtttttttgttt | |
| | gcaagcagcagattacgcgcagaaaaaaaggatctcaagaaga | |
| | tcctttgatcttttctagtgtgcg | |
| attP_Puro | gatgccagctcattcctcccactcatgatctatagatcccccgg | 4285 |
| donor DNA: | gctgcaggaattctacccactctgtcgataccccaccgagaccc | |
| | cattggggccaatacgcccgcgtttcttccttttccccacccca | |
| | ccccccaagttcgggtgaaggcccagggctcgcagccaacgtc | |
| | ggggcggcaagcttacatcgagatcccggtttgtctggtcaac | |
| | caccgcggtctcagtggtgtacggtacaaaccccgtgagcaag | |
| | ggcgaggagctgttcaccggggtggtgcccatcctggtcga | |
| | gctggacggcgacgtaaacggccacaagttcagcgtgtccggc | |
| | gagggcgagggcgatgccacctacggcaagctgaccctgaag | |
| | ttcatctgcaccaccggcaagctgcccgtgccctggcccacc | |
| | ctcgtgaccaccctgacctacggcgtgcagtgcttcagccgct | |
| | accccgaccacatgaagcagcacgacttcttcaagtccgccat | |
| | gcccgaaggctacgtccaggagcgcaccatcttcttcaagga | |
| | cgacggcaactacaagacccgcgccgaggtgaagttcgaggg | |
| | cgacaccctggtgaaccgcatcgagctgaagggcatcgact | |
| | tcaaggaggacggcaacatcctggggcacaagctggagtacaa | |
| | ctacaacagccacaacgtctatatcatggccgacaagcagaa | |
| | gaacggcatcaaggtgaacttcaagatccgccacaacatcgag | |
| | gacggcagcgtgcagctcgccgaccactaccagcagaacac | |
| | ccccatcggcgacggccccgtgctgctgcccgacaaccacta | |
| | cctgagcacccagtccgccctgagcaaagaccccaacgagaa | |
| | gcgcgatcacatggtcctgctggagttcgtgaccgccgccgg | |
| | gatcactctcggcatggacgagctgtacaagagcggcctga | |
| | ggagcagagcccaggcgagcaacagcgccgtggacgccacc | |
| | atgggcgatcgcccgggaattgactagtgcggccgcctaggat | |
| | ccatgccgatagcgttggttgagtggataaccgtattaccgcc | |
| | aagcttatgcatgtgcccgtcagtgggcagagcgcacatcgc | |
| | ccacagtccccgagaagttggggggaggggtcggcaattgaa | |
| | ccggtgcctagagaaggtggcgcggggtaaactgggaaagtg | |
| | atgtcgtgtactggctccgcctttttcccgagggtgggggaga | |
| | accgtatataagtgcagtagtcgccgtgaacgttctttttcgca | |
| | acgggtttgccgccagaacacaggtaagtgccgtgtgtggttcc | |
| | cgcgggcctggcctctttacgggttatggcccttgcgtgccttga | |
| | attacttccacctggctgcagtacgtgattcttgatcccgagctt | |
| | cgggttggaagtgggtgggagagttcgaggccttgcgcttaag | |
| | gagccccttcgcctcgtgcttgagttgaggcctggcctgggcg | |
| | ctggggccgccgcgtgcgaatctggtggcaccttcgcgcctgtct | |
| | cgctgctttcgataagtctctagccatttaaaatttttgatgacc | |
| | tgctgcgacgctttttttctggcaagatagtcttgtaaatgcgg | |
| | gccaagatctgcacactggtatttcggtttttggggccgcgggcg | |
| | gcgacggggcccgtgcgtcccagcgcacatgttcggcgagg | |
| | cggggcctgcgagcgcggccaccgagaatcggacgggggt | |
| | agtctcaagctggccggcctgctctggtgcctggcctcgcg | |
| | ccgccgtgtatcgccccgccctgggcggcaaggctggcccggt | |
| | cggcaccagttgcgtgagcggaaagatggccgcttcccggc | |
| | cctgctgcagggagctcaaaatggaggacgcggcgctcggga | |
| | gagcgggcgggtgagtcacccacacaaaggaaaagggcctttc | |
| | cgtcctcagccgtcgcttcatgtgactccacggagtaccgggcg | |
| | ccgtccaggcacctcgattagttctcgcgcttttggagtacgtc | |
| | gtctttaggttggggggaggggttttatgcgatggagtttcccca | |
| | cactgagtgggtggagactgaagttaggccagcttggcacttgat | |
| | gtaattctccttggaatttgccctttttgagtttggatcttggtt | |
| | cattctcaagcctcagacagtggttcaaagtttttttcttccatt | |
| | tcaggtgtcgtgagctagcccaccatgaccgagtacaagcccacg | |
| | gtgcgcctcgccacccgcgacgacgtcccccgggccgtacgc | |
| | accctcgccgccgcgttcgccgactaccccgccacgcgcca | |
| | caccgtcgacccggaccgccacatcgagcgggtcaccgagct | |
| | gcaagaactcttcctcacgcgcgtcgggctcgacatcggcaa | |
| | ggtgtgggtcgcggacgacggcgccgcggtggcggtctgg | |
| | accacgccggagagcgtcgaagcgggggcggtgttcgccga | |
| | gatcggcccgcgcatggccgagttgagcggttcccggctgg | |
| | ccgcgcagcaacagatggaaggcctcctggcgccgcaccggc | |
| | ccaaggagcccgcgtggttcctggccaccgtcggcgtctcgc | |
| | ccgaccaccagggcaagggtctgggcagcgccgtcgtgctcc | |
| | ccggagtggaggcggccgagcgcgccggggtgcccgccttc | |
| | ctggagacctccgcgccccgcaacctccccttctacgagcgg | |
| | ctcggcttcaccgtcaccgccgacgtcgaggtgcccgaagg | |
| | accgcgcacctggtgcatgacccgcaagcccggtgccggatc | |
| | gggagagggcagaggaagtctgctaacatgcggtgacgtc | |
| | gaggagaatcctggcccaccggtcgccaccagcgagctgatta | |
| | aggagaacatgcacatgaagctgtacatggagggcaccgtgg | |
| | acaaccatcacttcaagtgcacatccgagggcgaaggcaagc | |
| | cctacgagggcacccagaccatgagaatcaaggtggtcgaggg | |
| | cggccctctccccttcgccttcgacatcctggctactagcttc | |
| | ctctacggcagcaagaccttcatcaaccacacccagggcatc | |
| | cccgacttcttcaagcagtccttccctgagggcttcacatgggag | |
| | agagtcaccacatacgaagacgggggcgtgctgaccgctacc | |
| | caggacaccagcctccaggacggctgcctcatctacaacgtc | |
| | aagatcagaggggtgaacttcacatccaacggccctgtgatg | |
| | cagaagaaaacactcggctgggaggccttcaccgagacgctgt | |
| | accccgctgacggcggcctggaaggcagaaacgacatggcc | |
| | ctgaagctcgtgggcgggagccatctgatcgcaaacatcaag | |
| | accacatatagatccaagaaacccgctaagaacctcaagatgc | |
| | ctggcgtctactatgtggactacagactggaaagaatcaagga | |
| | ggccaacaacgagacctacgtcgagcagcacgaggtggcagt | |
| | ggccagatactgcgacctccctagcaaactggggcacaagcttaa | |
| | ttaagaattctctagaggatccagacatgataagatacattgatg | |
| | agtttggacaaaccacaactagaatgcagtgaaaaaaatgcttta | |
| | tttgtgaaatttgtgatgctattgctttatttgtaaccattataa | |
| | gctgcaataaacaagttaacaacaacaattgcattcattttatgt | |
| | ttcaggttcagggggaggtgtgggaggttttttaaagcaagtaaa | |
| | acctctacaaatgtggtatggctgattatgatcctgcaagcctcg | |
| | tcgccgcggtttattctgttgacaattaatcatcggcatagtat | |
| | atcggcatagtataatacgacaaggtgaggaactaaaccatggga | |
| | tcggccattgaacaagatggattgcacgcaggttctccggccg | |
| | cttgggtggagaggctattcggctatgactgggcacaacagac | |
| | gatcggctgctctgatgccgccgtgttccggctgtcagcgcag | |
| | gggcgcccggttctttttgtcaagaccgacctgtccggtgccct | |
| | gaatgaactgcaggacgaggcagcgcggctatcgtggctggc | |
| | cacgacgggcgttccttgcgcagctgtgctcgacgttgtcact | |
| | gaagcgggaagggactggctgctattgggcgaagtgccggggc | |
| | aggatctcctgtcatctcaccttgctcctgccgagaaagtatc | |
| | catcatggctgatgcaatgcggcggctgcatacgcttgatccg | |
| | gctacctgcccattcgaccaccaagcgaaacatcgcatcgagc | |
| | gagcacgtactcggatggaagccggtcttgtcgatcaggatg | |
| | atctggacgaagagcatcaggggctcgcgccagccgaactgtt | |
| | cgccaggctcaaggcgcgcatgcccgacggcgaggatctcgt | |
| | cgtgacccatggcgatgcctgcttgccgaatatcatggtggaa | |
| | aatggccgcttttctggattcatcgactgtggccggctgggtgt | |
| | ggcggaccgctatcaggacatagcgttggctacccgtgatattg | |
| | ctgaagagcttggcggcgaatgggctgaccgcttcctcgtgct | |
| | ttacggtatcgccgcccccgattcgcagcgcatcgccttctatc | |
| | gccttcttgacgagttcttctgagcgggactctggggttcgaat | |
| | aaagaccgaccaagcgacgtctgagagctccctggcgaattcggt | |
| | accaataaaagagctttattttcatgatctgtgtgttggtttttg | |
| | gccgcgttgctggcgtttttccataggctccgcccccctgacgag | |
| | catcacaaaaatcgacgctcaagtcagaggtggcgaaacccga | |
| | caggactataaagataccaggcgtttccccctggaagctccct | |
| | cgtgcgctctcctgttccgaccctgccgcttaccggatacctgt | |
| | ccgcctttctcccttcgggaagcgtggcgctttctcatagctcac | |
| | gctgtaggtatctcagttcggtgtaggtcgttcgctccaagctg | |
| | ggctgtgtgcacgaaccccccgttcagcccgaccgctgcgcctt | |
| | atccggtaactatcgtcttgagtccaacccggtaagacacgac | |
| | ttatcgccactggcagcagccactggtaacaggattagcagag | |
| | cgaggtatgtaggcggtgctacagagttcttgaagtggtggcct | |
| | aactacggctacactagaagaacagtatttggtatctgcgctct | |
| | gctgaagccagttaccttcggaaaaagagttggtagctcttgat | |
| | ccggcaaacaaaccaccgctggtagcggtggtttttttgtttgca | |
| | agcagcagattacgcgcagaaaaaaaggatctcaagaagatcc | |
| | tttgatcttttctagtgtgcg | |

### Multiplex Editing and Recombinase-Mediated Inversion

[1898] Large structural variants are found in many human pathogenic alleles, such as the large 0.6-Mb inversion at the F8 locus that causes ˜50% of severe hemophilia A cases. Inspired by the high efficiency of recombinase attachments site insertions using twinPE, it was reasoned that multiplexing the insertion of both attB and attP Bxb1 attachment sites could be used to correct more complex genetic variants by unidirectional deletion or inversion of the intervening DNA sequence. To test this approach on a therapeutically relevant locus, a 39-kb inversion between IDS and its pseudogene IDS2 was attempted. Inversions between these sites have been observed in —13% of Hunter syndrome cases, and characterization of the breakpoints in pathogenic alleles has revealed that the inversion often occurs within a recombination hotspot of intron 7 that is present in both IDS and IDS2. Therefore, regions flanking these recombination hotspots were targeted to insert Bxb1 attP and attB attachment sequences, which when oriented in opposite directions, could be used as substrated for unidirectional inversion by Bxb1 for the correction of the pathogenic allele sequence in patient cells (FIG. 111A). After screening 12 pegRNA spacer pairs and optimizing pegRNA sequence features, it was found that pegRNA pairs that are capable of inserting attP or attB attachment sites at the left and right targeted sites with 73.7% and 69.8% efficiency, respectively (FIG. 111B).

[1899] Next, multiplexing twinPE-mediated insertion of both attP and attB attachment sites were explored with Bxb1 recombinase-mediated inversion of the 39-kb sequence in IDS and IDS2. Initially, sequential DNA transfections were explored with twinPE components followed by Bxb1 recombinase. A first set of pegRNAs (set 1) was tested that installs a forward-oriented attP sequence in intron 3 of IDS2 and a reverse-oriented attB sequence in intron 7 of IDS. In addition, a second set of pegRNAs (set 2) was used to install a reverse-oriented attP sequence in IDS2 and a forward-oriented attB sequence in IDS in a first transfection. 52.3% or 54.5% attP sequence insertion and 27.6% or 30.9% attB sequence insertion was observed for multiplex editing with pegRNA set 1 and set 2, respectively (FIG. 111C). When edited cells were subsequently transfected with Bxb1 recombinase, a significantly decreased percentage of amplified alleles containing attP and attB sequence was observed compared to mock transfection controls (p-value <0.05), suggesting that some edited alleles were being used as substrates for Bxb1-mediated recombination (FIG. 111C) Amplification of the anticipated inversion junctions followed by amplicon sequencing showed both the attL and attR sequence signatures of Bxb1-mediated recombination, with product purity at or above 80% at both junctions (FIG. 111D).

[1900] To carry out one-pot twinPE and Bxb1-mediated inversion and circumvent unwanted recombination between pegRNA plasmid DNA, all-RNA components comprising PE2 mRNA, synthetic pegRNAs from set 1, and Bxb1 mRNA were nucleofected. Using amplicon sequencing, the expected inverted allele junctions containing attR and attL sequences were captured. Furthermore, to quantify the inversion efficiency, a reverse primer that can bind to an identical sequence in both the non-inverted and inverted alleles and therefore amplify both edits using the same primer pair was designed (FIGS. 116). ˜4.6-7.2% and ˜1.5-2.3% inversion efficiency for “sequential” and “one-pot” strategy was observed, respectively (FIG. 111E). Collectively, these data support that combining twinPE with site-specific serine recombinases could be used to correct a common 39-kb inversion found in Hunter syndrome alleles and could serve as a promising therapeutic platform for targeting other complex pathogenic variants.

### Discussion

[1901] As presented herein, a twin prime editing approach that can be used to delete, replace, or insert DNA sequences at targeted location in the genomes of human cells was developed. When combined with site-specific serine recombinase enzymes, twinPE can also support the integration of DNA cargo, or the inversion of DNA sequence.

### Methods

### General Methods

[1902] DNA amplification was conducted by PCR using Phusion U Green Multiplex PCR Master Mix (ThermoFisher Scientific) or Q5 Hot Start High-Fidelity 2× Master Mix (New England BioLabs) unless otherwise noted. DNA oligonucleotides were obtained from Integrated DNA Technologies. Plasmids expressing sgRNAs were constructed by ligation of annealed oligonucleotides into BsmBI-digested acceptor vector. Plasmids expressing pegRNAs were constructed by Gibson assembly or Golden Gate assembly as previously described. Sequences of sgRNA and pegRNA constructs used in this Example are listed in Tables 11-12.

TABLE 11
Sequences of sgRNA used in this Example

| | | SEQ |
|---|---|---|
| sgRNA | Spacer Sequence | ID NO: |
| HEK3_3b_+90_ | GTCAACCAGTATCCCGGTGC | 616 |
| nicking | | |
| pU6-Sp-sgRNA- | GATTGGCTTTGATTTCCCTA | 3971 |
| DMDExo51-A1 | | |
| pU6-Sp-sgRNA- | GTATATGATTGTTACTGAGA | 3972 |
| DMDExo51-A3 | | |
| pU6-Sp-sgRNA- | Gcagttgcctaagaactggt | 3973 |
| DMDExo51-B1 | | |

TABLE 12
Sequences of pegRNA used in this Example

| | | Spacer | | Extension |
|---|---|---|---|---|
| | Spacer | SEQ | | SEQ |
| pegRNA | Sequence | ID NO: | 3′ Extension | ID NO: |
| HEK3_attB_A_38 | ggcccagactgagc | 383 | ATGATCCTGACGACGGAGACCGCCGT | 4029 |
| | acgtga | | CGTCGACAAGCCCGTGCTCAGTCTG | |
| HEK3_attB_A_34 | ggcccagactgagc | 383 | TCCTGACGACGGAGACCGCCGTCGTC | 4030 |
| | acgtga | | GACAAGCCCGTGCTCAGTCTG | |
| HEK3_attB_A_30 | ggcccagactgagc | 383 | GACGACGGAGACCGCCGTCGTCGAC | 4031 |
| | acgtga | | AAGCCCGTGCTCAGTCTG | |
| HEK3_attB_B_38 | gtcaaccagtatccc | 616 | GGCTTGTCGACGACGGCGGTCTCCGT | 4032 |
| | ggtgc | | CGTCAGGATCATCCGGGATACTGG | |
| HEK3_attB_B_34 | gtcaaccagtatccc | 616 | TGTCGACGACGGCGGTCTCCGTCGTC | 4033 |
| | ggtgc | | AGGATCATCCGGGATACTGG | |
| HEK3_attB_B_30 | gtcaaccagtatccc | 616 | GACGACGGCGGTCTCCGTCGTCAGGA | 4034 |
| | ggtgc | | TCATCCGGGATACTGG | |
| HEK3_attP_A_43 | ggcccagactgagc | 383 | TACCGTACACCACTGAGACCGCGGTG | 4035 |
| | acgtga | | GTTGACCAGACAAACCTCGTGCTCAG | |
| | | | TCTG | |
| HEK3_attP_A_39 | ggcccagactgagc | 383 | GTACACCACTGAGACCGCGGTGGTTG | 4036 |
| | acgtga | | ACCAGACAAACCTCGTGCTCAGTCTG | |
| HEK3_attP_A_35 | ggcccagactgagc | 383 | ACCACTGAGACCGCGGTGGTTGACCA | 4037 |
| | acgtga | | GACAAACCTCGTGCTCAGTCTG | |
| HEK3_attP_B_44 | gtcaaccagtatccc | 616 | GTCTGGTCAACCACCGCGGTCTCAGT | 4038 |
| | ggtgc | | GGTGTACGGTACAAACCTCCGGGATA | |
| | | | CTGG | |
| HEK3_attP_B_40 | gtcaaccagtatccc | 616 | GGTCAACCACCGCGGTCTCAGTGGTG | 4039 |
| | ggtgc | | TACGGTACAAACCTCCGGGATACTGG | |
| HEK3_attP_B_36 | gtcaaccagtatccc | 616 | AACCACCGCGGTCTCAGTGGTGTACG | 4040 |
| | ggtgc | | GTACAAACCTCCGGGATACTGG | |
| PE3_HEK3_FKBP_ins12bp | ggcccagactgagc | 383 | tggaggaagcagggcttcctttcctctgccatcacacctgcac | 4041 |
| | acgtga | | tcccgtgctcagtctg | |
| PE3_HEK3_FKBP_ins36bp | ggcccagactgagc | 383 | tggaggaagcagggcttcctttcctctgccatcacccgtctcc | 4042 |
| | acgtga | | tggggagatggtttccacctgcactcccgtgctcagtctg | |
| PE3_HEK3_FKBP_ins108bp | ggcccagactgagc | 383 | tggaggaagcagggcttcctttcctctgccatcaaaatttctttc | 4043 |
| | acgtga | | catcttcaagcatcccggtgtagtgcaccacgcaggtctggc | |
| | | | cgcgcttggggaaggtgcgcccgtctcctggggagatggttt | |
| | | | ccacctgcactcccgtgctcagtctg | |
| PE3_HEK3_FKBP_ins321bp | ggcccagactgagc | 383 | tggaggaagcagggcttcctttcctctgccatcattccagtttt | 4044 |
| | acgtga | | agaagctccacatcgaagacgagagtggcatgtggtgggat | |
| | | | gatgcctgggtgcccagtggcaccataggcataatctggag | |
| | | | atatagtcagtttggctctctgacccacactcatctgggcaacc | |
| | | | ccttcttcccagcctcggatcacctcctgcttgcctagcataaa | |
| | | | cttaaagggcttgtttctgtcccgggaggaatcaaatttctttcc | |
| | | | atcttcaagcatcccggtgtagtgcaccacgcaggtctggcc | |
| | | | gcgcttggggaaggtgcgcccgtctcctggggagatggtttc | |
| | | | cacctgcactcccgtgctcagtctg | |
| twinPE_HEK3_FKBP_ | ggcccagactgagc | 383 | accacgcaggtctggccgcgcttggggaaggtgcgcccgt | 4045 |
| ins108bp_32bp_ | acgtga | | ctcctggggagatggtttccacctgcactcccgtgctcagtct | |
| overhang_A | | | g | |
| twinPE_HEK3_FKBP_ | gtcaaccagtatccc | 616 | accttccccaagcgcggccagacctgcgtggtgcactacac | 4046 |
| ins108bp_32bp_ | ggtgc | | cgggatgcttgaagatggaaagaaatttccgggatactgg | |
| overhang_B | | | | |
| pU6-Sp-gRNA- | ggcccagactgagc | 383 | tcctctgccatcacgtgctcagtctg | 4047 |
| HEK3_del_DF_A_13nt | acgtga | | | |
| TEMP_Basic | | | | |
| pU6-Sp-gRNA- | gtcaaccagtatccc | 616 | tgatggcagaggaccgggatactgg | 4048 |
| HEK3_del_DF_B_13nt | ggtgc | | | |
| TEMP_Basic | | | | |
| pU6-Sp-gRNA- | ggcccagactgagc | 383 | tggaggaagcagggcttcctttcctctgccatcacgtgctcag | 4049 |
| HEK3_del_DF_A_34nt | acgtga | | tctg | |
| TEMP_Basic | | | | |
| pU6-Sp-gRNA- | gtcaaccagtatccc | 616 | tgatggcagaggaaaggaagccctgcttcctccaccgggat | 4050 |
| HEK3_del_DF_B_34nt | ggtgc | | actgg | |
| TEMP_Basic | | | | |
| pU6-Sp-gRNA- | ggcccagactgagc | 383 | tgcaggagctgcatcctctgccatcacgtgctcagtctg | 4051 |
| HEK3_del_DF_A_13- | acgtga | | | |
| 13TEMP_Hybrid | | | | |
| pU6-Sp-gRNA- | gtcaaccagtatccc | 616 | tgatggcagaggatgcagctcctgcaccgggatactgg | 4052 |
| HEK3_del_DF_B_13- | ggtgc | | | |
| 13TEMP_Hybrid | | | | |
| pU6-Sp-gRNA- | ggcccagactgagc | 383 | gcccagccaaacttgtcaaccagtatcccggcgtgctcagtc | 4053 |
| HEK3_del_DF_A_31nt | acgtga | | tg | |
| TEMP_Shendure | | | | |
| pU6-Sp-gRNA- | gtcaaccagtatccc | 616 | gggtcaatccttggggcccagactgagcacgccgggatact | 4054 |
| HEK3_del_DF_B_31nt | ggtgc | | gg | |
| TEMP_Shendure | | | | |
| pU6-Sp-gRNA- | ggcccagactgagc | 383 | tcctctgccatcacgtgctcagtctgTTAAATAACGC | 4055 |
| HEK3_del_DF_A_13nt | acgtga | | GGTTCTATCTAGTTACGCGTTAAACC | |
| TEMP_Basic_EvoPreQ1 | | | AACTAGAA | |
| pU6-Sp-gRNA- | gtcaaccagtatccc | 616 | tgatggcagaggaccgggatactggAAAATATACG | 4056 |
| HEK3_del_DF_B_13nt | ggtgc | | CGGTTCTATCTAGTTACGCGTTAAAC | |
| TEMP_Basic_EvoPreQ1 | | | CAACTAGAA | |
| pU6-Sp-gRNA- | ggcccagactgagc | 383 | tggaggaagcagggcttcctttcctctgccatcacgtgctcag | 4057 |
| HEK3_del_DF_A_34nt | acgtga | | tctgTTAATAATCGCGGTTCTATCTAGT | |
| TEMP_Basic_EvoPreQ1 | | | TACGCGTTAAACCAACTAGAA | |
| pU6-Sp-gRNA- | gtcaaccagtatccc | 616 | tgatggcagaggaaaggaagccctgcttcctccaccgggat | 4058 |
| HEK3_del_DF_B_34nt | ggtgc | | actggAAAAAAAACGCGGTTCTATCTAG | |
| TEMP_Basic_EvoPreQ1 | | | TTACGCGTTAAACCAACTAGAA | |
| pU6-Sp-gRNA- | ggcccagactgagc | 383 | tgcaggagctgcatcctctgccatcacgtgctcagtctgAT | 4059 |
| HEK3_del_DF_A_13- | acgtga | | AAATAACGCGGTTCTATCTAGTTACG | |
| 13TEMP_Hybrid_ | | | CGTTAAACCAACTAGAA | |
| EvoPreQ1 | | | | |
| pU6-Sp-gRNA- | gtcaaccagtatccc | 616 | tgatggcagaggatgcagctcctgcaccgggatactggAA | 4060 |
| HEK3_del_DF_B_13- | ggtgc | | AAAAGGCGCGGTTCTATCTAGTTACG | |
| 13TEMP_Hybrid_ | | | CGTTAAACCAACTAGAA | |
| EvoPreQ1 | | | | |
| pU6-Sp-gRNA- | ggcccagactgagc | 383 | gcccagccaaacttgtcaaccagtatcccggcgtgctcagtc | 4061 |
| HEK3_del_DF_A_31nt | acgtga | | tgTTAAATACCGCGGTTCTATCTAGTT | |
| TEMP_Shendure_ | | | ACGCGTTAAACCAACTAGAA | |
| EvoPreQ1 | | | | |
| pU6-Sp-gRNA- | gtcaaccagtatccc | 616 | gggtcaatccttggggcccagactgagcacgccgggatact | 4062 |
| HEK3_del_DF_B_31nt | ggtgc | | ggAAAATAATCGCGGTTCTATCTAGTT | |
| TEMP_Shendure_ | | | ACGCGTTAAACCAACTAGAA | |
| EvoPreQ1 | | | | |
| pU6-Sp-pegRNA- | GATTGGCTTT | 3971 | ttgaataggaagtaaattaatttgaagctggaccctagGGA | 4063 |
| DMDExo51- | GATTTCCCTA | | AATCAA | |
| A1_a_Basic | | | | |
| pU6-Sp-pegRNA- | GATTGGCTTT | 3971 | ttgaataggaagtaaattaatttgaagctggaccctagGGA | 4064 |
| DMDExo51- | GATTTCCCTA | | AATCAAAG | |
| A1_b_Basic | | | | |
| pU6-Sp-pegRNA- | GATTGGCTTT | 3971 | ttgaataggaagtaaattaatttgaagctggaccctagGGA | 4065 |
| DMDExo51- | GATTTCCCTA | | AATCAAAGCC | |
| A1_c_Basic | | | | |
| pU6-Sp-pegRNA- | Gcagttgcctaagaa | 3973 | tagggtccagcttcaaattaatttacttcctattcaaagttcttag | 4066 |
| DMDExo51- | ctggt | | gc | |
| B1_A1_b_Basic | | | | |
| pU6-Sp-pegRNA- | Gcagttgcctaagaa | 3973 | tagggtccagcttcaaattaatttacttcctattcaaagttcttag | 4067 |
| DMDExo51- | ctggt | | gcaa | |
| B1_A1_c_Basic | | | | |
| pU6-Sp-pegRNA- | GTATATGATT | 3972 | atgcctggacaagtaacttaagttaaataagccttctCAGT | 4068 |
| DMDExo51- | GTTACTGAG | | AACAATCAT | |
| A3_c_Basic | A | | | |
| pU6-Sp-pegRNA- | Gcagttgcctaagaa | 3973 | agaaggcttatttaacttaagttacttgtccaggcatagttctta | 4069 |
| DMDExo51- | ctggt | | g | |
| B1_A3_a_Basic | | | | |
| pu6-sp-pegrna- | GTATATGATT | 3972 | tgctgagagagaaacagttgcctaagaactCAGTAAC | 4070 |
| dmdexo51-a3- | GTTACTGAG | | AAT | |
| b1_a_PrimeDel | A | | | |
| pu6-sp-pegrna- | Gcagttgcctaagaa | 3973 | accacttccacaatgtatatgattgttactgagttcttagg | 4071 |
| dmdexo51-b1-a3_a- | ctggt | | | |
| PrimeDel | | | | |
| pu6-sp-pegrna- | Gcagttgcctaagaa | 3973 | accacttccacaatgtatatgattgttactgagttcttaggcaa | 4072 |
| dmdexo51-b1-a3_b- | ctggt | | | |
| PrimeDel | | | | |
| pU6-Sp-pegRNA- | GTATATGATT | 3972 | ATGATCCTGACGACGGAGACCGCCGT | 4073 |
| DMDExo51- | GTTACTGAG | | CGTCGACAAGCCCAGTAACAATC | |
| A3_b_attB_fwd | A | | | |
| pU6-Sp-pegRNA- | GTATATGATT | 3972 | ATGATCCTGACGACGGAGACCGCCGT | 4074 |
| DMDExo51- | GTTACTGAG | | CGTCGACAAGCCCAGTAACAATCATA | |
| A3_c_attB_fwd | A | | | |
| pU6-Sp-pegRNA- | Gcagttgcctaagaa | 3973 | GGCTTGTCGACGACGGCGGTCTCCGT | 4075 |
| DMDExo51- | ctggt | | CGTCAGGATCATagttcttaggc | |
| B1_b_attB_fwd | | | | |
| pU6-Sp-pegRNA- | Gcagttgcctaagaa | 3973 | GGCTTGTCGACGACGGCGGTCTCCGT | 4076 |
| DMDExo51- | ctggt | | CGTCAGGATCATagttcttaggcaac | |
| B1_c_attB_fwd | | | | |
| pU6-Sp-pegRNA- | Gaggagagtaaagt | 3974 | GGCTTGTCGACGACGGCGGTCTCCGT | 4077 |
| DMDExo51- | gattgg | | CGTCAGGATCATatcactttactc | |
| B2_b_attB_fwd | | | | |
| pU6-Sp-pegRNA- | Gaggagagtaaagt | 3974 | GGCTTGTCGACGACGGCGGTCTCCGT | 4078 |
| DMDExo51- | gattgg | | CGTCAGGATCATatcactttactctcc | |
| B2_c_attB_fwd | | | | |
| A_1077a | GCAGAGCCA | 3975 | TACCGTACACCACTGAGACCGCGGTG | 4079 |
| | GGAACCCCT | | GTTGACCAGACAAACCTGGGGTTCCT | |
| | GT | | | |
| A_1077b | GCAGAGCCA | 3975 | TACCGTACACCACTGAGACCGCGGTG | 4080 |
| | GGAACCCCT | | GTTGACCAGACAAACCTGGGGTTCCT | |
| | GT | | GG | |
| A_1077c | GCAGAGCCA | 3975 | TACCGTACACCACTGAGACCGCGGTG | 4081 |
| | GGAACCCCT | | GTTGACCAGACAAACCTGGGGTTCCT | |
| | GT | | GGCT | |
| A_1098a | GGGAAGGGG | 3976 | TACCGTACACCACTGAGACCGCGGTG | 4082 |
| | CAGGAGAGC | | GTTGACCAGACAAACCTCTCTCCTGC | |
| | CA | | | |
| A_1098b | GGGAAGGGG | 3976 | TACCGTACACCACTGAGACCGCGGTG | 4083 |
| | CAGGAGAGC | | GTTGACCAGACAAACCTCTCTCCTGC | |
| | CA | | CC | |
| A_1098c | GGGAAGGGG | 3976 | TACCGTACACCACTGAGACCGCGGTG | 4084 |
| | CAGGAGAGC | | GTTGACCAGACAAACCTCTCTCCTGC | |
| | CA | | CCCT | |
| A_1246a | GAATATGTC | 3977 | TACCGTACACCACTGAGACCGCGGTG | 4085 |
| | CCAGATAGC | | GTTGACCAGACAAACCTCTATCTGGG | |
| | AC | | | |
| A_1246b | GAATATGTC | 3977 | TACCGTACACCACTGAGACCGCGGTG | 4086 |
| | CCAGATAGC | | GTTGACCAGACAAACCTCTATCTGGG | |
| | AC | | AC | |
| A_1246c | GAATATGTC | 3977 | TACCGTACACCACTGAGACCGCGGTG | 4087 |
| | CCAGATAGC | | GTTGACCAGACAAACCTCTATCTGGG | |
| | AC | | ACAT | |
| A_1267a | GGGGACTCT | 3978 | TACCGTACACCACTGAGACCGCGGTG | 4088 |
| | TTAAGGAAA | | GTTGACCAGACAAACCTTTCCTTAAA | |
| | GA | | | |
| A_1267b | GGGGACTCT | 3978 | TACCGTACACCACTGAGACCGCGGTG | 4089 |
| | TTAAGGAAA | | GTTGACCAGACAAACCTTTCCTTAAA | |
| | GA | | GA | |
| A_1267c | GGGGACTCT | 3978 | TACCGTACACCACTGAGACCGCGGTG | 4090 |
| | TTAAGGAAA | | GTTGACCAGACAAACCTTTCCTTAAA | |
| | GA | | GAGT | |
| A_1293a | GAGAAAGAG | 3979 | TACCGTACACCACTGAGACCGCGGTG | 4091 |
| | AAAGGGAGT | | GTTGACCAGACAAACCTCTCCCTTTC | |
| | AG | | | |
| A_1293b | GAGAAAGAG | 3979 | TACCGTACACCACTGAGACCGCGGTG | 4092 |
| | AAAGGGAGT | | GTTGACCAGACAAACCTCTCCCTTTC | |
| | AG | | TC | |
| A_1293c | GAGAAAGAG | 3979 | TACCGTACACCACTGAGACCGCGGTG | 4093 |
| | AAAGGGAGT | | GTTGACCAGACAAACCTCTCCCTTTC | |
| | AG | | TCTT | |
| A_1307a | GAGTAGAGG | 3980 | TACCGTACACCACTGAGACCGCGGTG | 4094 |
| | CGGCCACGA | | GTTGACCAGACAAACCTCGTGGCCGC | |
| | CC | | | |
| A_1307b | GAGTAGAGG | 3980 | TACCGTACACCACTGAGACCGCGGTG | 4095 |
| | CGGCCACGA | | GTTGACCAGACAAACCTCGTGGCCGC | |
| | CC | | CT | |
| A_1307c | GAGTAGAGG | 3980 | TACCGTACACCACTGAGACCGCGGTG | 4096 |
| | CGGCCACGA | | GTTGACCAGACAAACCTCGTGGCCGC | |
| | CC | | CTCT | |
| A_1582a | GATCAGTGA | 3981 | TACCGTACACCACTGAGACCGCGGTG | 4097 |
| | AACGCACCA | | GTTGACCAGACAAACCTGGTGCGTTT | |
| | GA | | | |
| A_1582b | GATCAGTGA | 3981 | TACCGTACACCACTGAGACCGCGGTG | 4098 |
| | AACGCACCA | | GTTGACCAGACAAACCTGGTGCGTTT | |
| | GA | | CA | |
| A_1582c | GATCAGTGA | 3981 | TACCGTACACCACTGAGACCGCGGTG | 4099 |
| | AACGCACCA | | GTTGACCAGACAAACCTGGTGCGTTT | |
| | GA | | CACT | |
| A_1615a | GCAGCTCAG | 3982 | TACCGTACACCACTGAGACCGCGGTG | 4100 |
| | GTTCTGGGA | | GTTGACCAGACAAACCTCCCAGAACC | |
| | GA | | | |
| A_1615b | GCAGCTCAG | 3982 | TACCGTACACCACTGAGACCGCGGTG | 4101 |
| | GTTCTGGGA | | GTTGACCAGACAAACCTCCCAGAACC | |
| | GA | | TG | |
| A_1615c | GCAGCTCAG | 3982 | TACCGTACACCACTGAGACCGCGGTG | 4102 |
| | GTTCTGGGA | | GTTGACCAGACAAACCTCCCAGAACC | |
| | GA | | TGAG | |
| A_1647a | GTGGCCACT | 3983 | TACCGTACACCACTGAGACCGCGGTG | 4103 |
| | GAGAACCGG | | GTTGACCAGACAAACCTCGGTTCTCA | |
| | GC | | | |
| A_1647b | GTGGCCACT | 3983 | TACCGTACACCACTGAGACCGCGGTG | 4104 |
| | GAGAACCGG | | GTTGACCAGACAAACCTCGGTTCTCA | |
| | GC | | GT | |
| A_1647c | GTGGCCACT | 3983 | TACCGTACACCACTGAGACCGCGGTG | 4105 |
| | GAGAACCGG | | GTTGACCAGACAAACCTCGGTTCTCA | |
| | GC | | GTGG | |
| A_1810a | GAATCTGCCT | 3984 | TACCGTACACCACTGAGACCGCGGTG | 4106 |
| | AACAGGAGG | | GTTGACCAGACAAACCTTCCTGTTAG | |
| | T | | | |
| A_1810b | GAATCTGCCT | 3984 | TACCGTACACCACTGAGACCGCGGTG | 4107 |
| | AACAGGAGG | | GTTGACCAGACAAACCTTCCTGTTAG | |
| | T | | GC | |
| A_1810c | GAATCTGCCT | 3984 | TACCGTACACCACTGAGACCGCGGTG | 4108 |
| | AACAGGAGG | | GTTGACCAGACAAACCTTCCTGTTAG | |
| | T | | GCAG | |
| A_1890a | GTCACCAAT | 3985 | TACCGTACACCACTGAGACCGCGGTG | 4109 |
| | CCTGTCCCTA | | GTTGACCAGACAAACCTGGGACAGG | |
| | G | | A | |
| A_1890b | GTCACCAAT | 3985 | TACCGTACACCACTGAGACCGCGGTG | 4110 |
| | CCTGTCCCTA | | GTTGACCAGACAAACCTGGGACAGG | |
| | G | | ATT | |
| A_1890c | GTCACCAAT | 3985 | TACCGTACACCACTGAGACCGCGGTG | 4111 |
| | CCTGTCCCTA | | GTTGACCAGACAAACCTGGGACAGG | |
| | G | | ATTGG | |
| A_3786a | GCTGGCCCC | 3986 | TACCGTACACCACTGAGACCGCGGTG | 4112 |
| | CCACCGCCC | | GTTGACCAGACAAACCTGGCGGTGGG | |
| | CA | | | |
| A_3786b | GCTGGCCCC | 3986 | TACCGTACACCACTGAGACCGCGGTG | 4113 |
| | CCACCGCCC | | GTTGACCAGACAAACCTGGCGGTGGG | |
| | CA | | GG | |
| A_3786c | GCTGGCCCC | 3986 | TACCGTACACCACTGAGACCGCGGTG | 4114 |
| | CCACCGCCC | | GTTGACCAGACAAACCTGGCGGTGGG | |
| | CA | | GGGC | |
| A_3835a | GACGTCACG | 3987 | TACCGTACACCACTGAGACCGCGGTG | 4115 |
| | GCGCTGCCC | | GTTGACCAGACAAACCTGGCAGCGCC | |
| | CA | | | |
| A_3835b | GACGTCACG | 3987 | TACCGTACACCACTGAGACCGCGGTG | 4116 |
| | GCGCTGCCC | | GTTGACCAGACAAACCTGGCAGCGCC | |
| | CA | | GT | |
| A_3835c | GACGTCACG | 3987 | TACCGTACACCACTGAGACCGCGGTG | 4117 |
| | GCGCTGCCC | | GTTGACCAGACAAACCTGGCAGCGCC | |
| | CA | | GTGA | |
| A_3856a | GGTGTGCTG | 3988 | TACCGTACACCACTGAGACCGCGGTG | 4118 |
| | GGCAGGTCG | | GTTGACCAGACAAACCTGACCTGCCC | |
| | CG | | | |
| A_3856b | GGTGTGCTG | 3988 | TACCGTACACCACTGAGACCGCGGTG | 4119 |
| | GGCAGGTCG | | GTTGACCAGACAAACCTGACCTGCCC | |
| | CG | | AG | |
| A_3856c | GGTGTGCTG | 3988 | TACCGTACACCACTGAGACCGCGGTG | 4120 |
| | GGCAGGTCG | | GTTGACCAGACAAACCTGACCTGCCC | |
| | CG | | AGCA | |
| B_1154a | GTCCTTGGCA | 3989 | GTCTGGTCAACCACCGCGGTCTCAGT | 4121 |
| | AGCCCAGGA | | GGTGTACGGTACAAACCTCTGGGCTT | |
| | G | | G | |
| B_1154b | GTCCTTGGCA | 3989 | GTCTGGTCAACCACCGCGGTCTCAGT | 4122 |
| | AGCCCAGGA | | GGTGTACGGTACAAACCTCTGGGCTT | |
| | G | | GCC | |
| B_1154c | GTCCTTGGCA | 3989 | cTCTGGTCAACCACCGCGGTCTCAGT | 4123 |
| | AGCCCAGGA | | GGTGTACGGTACAAACCTCTGGGCTT | |
| | G | | GCCAA | |
| B_1314a | GTGCGTCCTA | 3990 | GTCTGGTCAACCACCGCGGTCTCAGT | 4124 |
| | GGTGTTCACC | | GGTGTACGGTACAAACCTGAACACCT | |
| | | | A | |
| B_1314b | GTGCGTCCTA | 3990 | GTCTGGTCAACCACCGCGGTCTCAGT | 4125 |
| | GGTGTTCACC | | GGTGTACGGTACAAACCTGAACACCT | |
| | | | AGG | |
| B_1314c | GTGCGTCCTA | 3990 | TCTGGTCAACCACCGCGGTCTCAGTG | 4126 |
| | GGTGTTCACC | | GTGTACGGTACAAACCTGAACACCTA | |
| | | | GGAC | |
| B_1376a | GTCCTGGCA | 3991 | GTCTGGTCAACCACCGCGGTCTCAGT | 4127 |
| | GGGCTGTGG | | GGTGTACGGTACAAACCTCACAGCCC | |
| | TG | | T | |
| B_1376b | GTCCTGGCA | 3991 | GTCTGGTCAACCACCGCGGTCTCAGT | 4128 |
| | GGGCTGTGG | | GGTGTACGGTACAAACCTCACAGCCC | |
| | TG | | TGC | |
| B_1376c | GTCCTGGCA | 3991 | TCTGGTCAACCACCGCGGTCTCAGTG | 4129 |
| | GGGCTGTGG | | GTGTACGGTACAAACCTCACAGCCCT | |
| | TG | | GCCA | |
| B_1640a | GTGACCTGC | 3992 | GTCTGGTCAACCACCGCGGTCTCAGT | 4130 |
| | CCGGTTCTCA | | GGTGTACGGTACAAACCTAGAACCGG | |
| | G | | G | |
| B_1640b | GTGACCTGC | 3992 | GTCTGGTCAACCACCGCGGTCTCAGT | 4131 |
| | CCGGTTCTCA | | GGTGTACGGTACAAACCTAGAACCGG | |
| | G | | GCA | |
| B_1640c | GTGACCTGC | 3992 | TCTGGTCAACCACCGCGGTCTCAGTG | 4132 |
| | CCGGTTCTCA | | GTGTACGGTACAAACCTAGAACCGGG | |
| | G | | CAGG | |
| B_1676a | GAGCTTGGC | 3993 | GTCTGGTCAACCACCGCGGTCTCAGT | 4133 |
| | AGGGGGTGG | | GGTGTACGGTACAAACCTCACCCCCT | |
| | GA | | G | |
| B_1676b | GAGCTTGGC | 3993 | GTCTGGTCAACCACCGCGGTCTCAGT | 4134 |
| | AGGGGGTGG | | GGTGTACGGTACAAACCTCACCCCCT | |
| | GA | | GCC | |
| B_1676c | GAGCTTGGC | 3993 | TCTGGTCAACCACCGCGGTCTCAGTG | 4135 |
| | AGGGGGTGG | | GTGTACGGTACAAACCTCACCCCCTG | |
| | GA | | CCAA | |
| B_1701a | GAGCCAGAG | 3994 | GTCTGGTCAACCACCGCGGTCTCAGT | 4136 |
| | AGGATCCTG | | GGTGTACGGTACAAACCTAGGATCCT | |
| | GG | | C | |
| B_1701b | GAGCCAGAG | 3994 | GTCTGGTCAACCACCGCGGTCTCAGT | 4137 |
| | AGGATCCTG | | GGTGTACGGTACAAACCTAGGATCCT | |
| | GG | | CTC | |
| B_1701c | GAGCCAGAG | 3994 | TCTGGTCAACCACCGCGGTCTCAGTG | 4138 |
| | AGGATCCTG | | GTGTACGGTACAAACCTAGGATCCTC | |
| | GG | | TCTG | |
| B_1705a | GATGGAGCC | 3995 | GTCTGGTCAACCACCGCGGTCTCAGT | 4139 |
| | AGAGAGGAT | | GGTGTACGGTACAAACCTTCCTCTCT | |
| | CC | | G | |
| B_1705b | GATGGAGCC | 3995 | GTCTGGTCAACCACCGCGGTCTCAGT | 4140 |
| | AGAGAGGAT | | GGTGTACGGTACAAACCTTCCTCTCT | |
| | CC | | GGC | |
| B_1705c | GATGGAGCC | 3995 | TCTGGTCAACCACCGCGGTCTCAGTG | 4141 |
| | AGAGAGGAT | | GTGTACGGTACAAACCTTCCTCTCTG | |
| | CC | | GCTC | |
| B_1883a | GGGGCCACT | 3996 | GTCTGGTCAACCACCGCGGTCTCAGT | 4142 |
| | AGGGACAGG | | GGTGTACGGTACAAACCTCTGTCCCT | |
| | AT | | A | |
| B_1883b | GGGGCCACT | 3996 | GTCTGGTCAACCACCGCGGTCTCAGT | 4143 |
| | AGGGACAGG | | GGTGTACGGTACAAACCTCTGTCCCT | |
| | AT | | AGT | |
| B_1883c | GGGGCCACT | 3996 | TCTGGTCAACCACCGCGGTCTCAGTG | 4144 |
| | AGGGACAGG | | GTGTACGGTACAAACCTCTGTCCCTA | |
| | AT | | GTGG | |
| B_1902a | GTCCCCTCCA | 3997 | GTCTGGTCAACCACCGCGGTCTCAGT | 4145 |
| | CCCCACAGT | | GGTGTACGGTACAAACCTTGTGGGGT | |
| | G | | G | |
| B_1902b | GTCCCCTCCA | 3997 | GTCTGGTCAACCACCGCGGTCTCAGT | 4146 |
| | CCCCACAGT | | GGTGTACGGTACAAACCTTGTGGGGT | |
| | G | | GGA | |
| B_1902c | GTCCCCTCCA | 3997 | TCTGGTCAACCACCGCGGTCTCAGTG | 4147 |
| | CCCCACAGT | | GTGTACGGTACAAACCTTGTGGGGTG | |
| | G | | GAGG | |
| B_1962a | GGGACCACC | 3998 | GTCTGGTCAACCACCGCGGTCTCAGT | 4148 |
| | TTATATTCCC | | GGTGTACGGTACAAACCTGAATATAA | |
| | A | | G | |
| B_1962b | GGGACCACC | 3998 | GTCTGGTCAACCACCGCGGTCTCAGT | 4149 |
| | TTATATTCCC | | GGTGTACGGTACAAACCTGAATATAA | |
| | A | | GGT | |
| B_1962c | GGGACCACC | 3998 | TCTGGTCAACCACCGCGGTCTCAGTG | 4150 |
| | TTATATTCCC | | GTGTACGGTACAAACCTGAATATAAG | |
| | A | | GTGG | |
| B_3839a | GACCTGCCC | 3999 | GTCTGGTCAACCACCGCGGTCTCAGT | 4151 |
| | AGCACACCC | | GGTGTACGGTACAAACCTGGTGTGCT | |
| | TG | | G | |
| B_3839b | GACCTGCCC | 3999 | GTCTGGTCAACCACCGCGGTCTCAGT | 4152 |
| | AGCACACCC | | GGTGTACGGTACAAACCTGGTGTGCT | |
| | TG | | GGG | |
| B_3839c | GACCTGCCC | 3999 | TCTGGTCAACCACCGCGGTCTCAGTG | 4153 |
| | AGCACACCC | | GTGTACGGTACAAACCTGGTGTGCTG | |
| | TG | | GGCA | |
| B_3903a | GCGACTCCT | 4000 | GTCTGGTCAACCACCGCGGTCTCAGT | 4154 |
| | GGAAGTGGC | | GGTGTACGGTACAAACCTCCACTTCC | |
| | CA | | A | |
| B_3903b | GCGACTCCT | 4000 | GTCTGGTCAACCACCGCGGTCTCAGT | 4155 |
| | GGAAGTGGC | | GGTGTACGGTACAAACCTCCACTTCC | |
| | CA | | AGG | |
| B_3903c | GCGACTCCT | 4000 | TCTGGTCAACCACCGCGGTCTCAGTG | 4156 |
| | GGAAGTGGC | | GTGTACGGTACAAACCTCCACTTCCA | |
| | CA | | GGAG | |
| B_3930a | GGACTTCCC | 4001 | GTCTGGTCAACCACCGCGGTCTCAGT | 4157 |
| | AGTGTGCAT | | GGTGTACGGTACAAACCTTGCACACT | |
| | CG | | G | |
| B_3930b | GGACTTCCC | 4001 | GTCTGGTCAACCACCGCGGTCTCAGT | 4158 |
| | AGTGTGCAT | | GGTGTACGGTACAAACCTTGCACACT | |
| | CG | | GGG | |
| B_3930c | GGACTTCCC | 4001 | TCTGGTCAACCACCGCGGTCTCAGTG | 4159 |
| | AGTGTGCAT | | GTGTACGGTACAAACCTTGCACACTG | |
| | CG | | GGAA | |
| A_1_223_a | TTTGCAGTTT | 4002 | ATGATCCTGACGACGGAGACCGCCGT | 4160 |
| | ATCAGGATG | | CGTCGACAAGCCGCAGTTTATC | |
| | A | | | |
| A_1_223_b | TTTGCAGTTT | 4002 | ATGATCCTGACGACGGAGACCGCCGT | 4161 |
| | ATCAGGATG | | CGTCGACAAGCCGCAGTTTATCAG | |
| | A | | | |
| A_1_223_c | TTTGCAGTTT | 4002 | ATGATCCTGACGACGGAGACCGCCGT | 4162 |
| | ATCAGGATG | | CGTCGACAAGCCGCAGTTTATCAGG | |
| | A | | | |
| A_2_260_a | GGTTGAGCA | 4003 | ATGATCCTGACGACGGAGACCGCCGT | 4163 |
| | GGTAGATGT | | CGTCGACAAGCCTGAGCAGGT | |
| | CA | | | |
| A_2_260_b | GGTTGAGCA | 4003 | ATGATCCTGACGACGGAGACCGCCGT | 4164 |
| | GGTAGATGT | | CGTCGACAAGCCTGAGCAGGTAG | |
| | CA | | | |
| A_2_260_c | GGTTGAGCA | 4003 | ATGATCCTGACGACGGAGACCGCCGT | 4165 |
| | GGTAGATGT | | CGTCGACAAGCCTGAGCAGGTAGAT | |
| | CA | | | |
| A_3_325_a | CTGGGCGGC | 4004 | ATGATCCTGACGACGGAGACCGCCGT | 4166 |
| | AGCATAGTG | | CGTCGACAAGCCGGCGGCAGC | |
| | AG | | | |
| A_3_325_b | CTGGGCGGC | 4004 | ATGATCCTGACGACGGAGACCGCCGT | 4167 |
| | AGCATAGTG | | CGTCGACAAGCCGGCGGCAGCAT | |
| | AG | | | |
| A_3_325_c | CTGGGCGGC | 4004 | ATGATCCTGACGACGGAGACCGCCGT | 4168 |
| | AGCATAGTG | | CGTCGACAAGCCGGCGGCAGCATAG | |
| | AG | | | |
| A_4_360_a | GTCAAGAGT | 4005 | ATGATCCTGACGACGGAGACCGCCGT | 4169 |
| | TGACACATT | | CGTCGACAAGCCAAGAGTTGAC | |
| | GT | | | |
| A_4_360_b | GTCAAGAGT | 4005 | ATGATCCTGACGACGGAGACCGCCGT | 4170 |
| | TGACACATT | | CGTCGACAAGCCAAGAGTTGACAC | |
| | GT | | | |
| A_4_360_c | GTCAAGAGT | 4005 | ATGATCCTGACGACGGAGACCGCCGT | 4171 |
| | TGACACATT | | CGTCGACAAGCCAAGAGTTGACACA | |
| | GT | | | |
| A_5_507_a | CCCAAGTGA | 4006 | ATGATCCTGACGACGGAGACCGCCGT | 4172 |
| | TCACACTTGT | | CGTCGACAAGCCAAGTGATCAC | |
| | C | | | |
| A_5_507_b | CCCAAGTGA | 4006 | ATGATCCTGACGACGGAGACCGCCGT | 4173 |
| | TCACACTTGT | | CGTCGACAAGCCAAGTGATCACAC | |
| | C | | | |
| A_5_507_c | CCCAAGTGA | 4006 | ATGATCCTGACGACGGAGACCGCCGT | 4174 |
| | TCACACTTGT | | CGTCGACAAGCCAAGTGATCACACTT | |
| | C | | | |
| A_6_510_a | CCACCCAAG | 4007 | ATGATCCTGACGACGGAGACCGCCGT | 4175 |
| | TGATCACACT | | CGTCGACAAGCCCCCAAGTGA | |
| | T | | | |
| A_6_510_b | CCACCCAAG | 4007 | ATGATCCTGACGACGGAGACCGCCGT | 4176 |
| | TGATCACACT | | CGTCGACAAGCCCCCAAGTGATC | |
| | T | | | |
| A_6_510_c | CCACCCAAG | 4007 | ATGATCCTGACGACGGAGACCGCCGT | 4177 |
| | TGATCACACT | | CGTCGACAAGCCCCCAAGTGATCAC | |
| | T | | | |
| A_7_532_a | GGGAGAGAC | 4008 | ATGATCCTGACGACGGAGACCGCCGT | 4178 |
| | GCAAACACA | | CGTCGACAAGCCAGAGACGCA | |
| | GC | | | |
| A_7_532_b | GGGAGAGAC | 4008 | ATGATCCTGACGACGGAGACCGCCGT | 4179 |
| | GCAAACACA | | CGTCGACAAGCCAGAGACGCAAA | |
| | GC | | | |
| A_7_532_c | GGGAGAGAC | 4008 | ATGATCCTGACGACGGAGACCGCCGT | 4180 |
| | GCAAACACA | | CGTCGACAAGCCAGAGACGCAAACA | |
| | GC | | | |
| B_1_272_a | TCTCTGACCT | 4009 | GGCTTGTCGACGACGGCGGTCTCCGT | 4181 |
| | GTTTTTCCTT | | CGTCAGGATCATCTGACCTG | |
| B_1_272_b | TCTCTGACCT | 4009 | GGCTTGTCGACGACGGCGGTCTCCGT | 4182 |
| | GTTTTTCCTT | | CGTCAGGATCATCTGACCTGT | |
| B_1_272_c | TCTCTGACCT | 4009 | GGCTTGTCGACGACGGCGGTCTCCGT | 4183 |
| | GTTTTTCCTT | | CGTCAGGATCATCTGACCTGTTT | |
| B_2_291_a | TCTTACTGTC | 4010 | GGCTTGTCGACGACGGCGGTCTCCGT | 4184 |
| | CCCTTCTGGG | | CGTCAGGATCATTACTGTCCC | |
| B_2_291_b | TCTTACTGTC | 4010 | GGCTTGTCGACGACGGCGGTCTCCGT | 4185 |
| | CCCTTCTGGG | | CGTCAGGATCATTACTGTCCCCT | |
| B_2_291_c | TCTTACTGTC | 4010 | GGCTTGTCGACGACGGCGGTCTCCGT | 4186 |
| | CCCTTCTGGG | | CGTCAGGATCATTACTGTCCCCTTC | |
| B_3_305_a | TCTGGGCTCA | 4011 | GGCTTGTCGACGACGGCGGTCTCCGT | 4187 |
| | CTATGCTGCC | | CGTCAGGATCATGGGCTCACT | |
| B_3_305_b | TCTGGGCTCA | 4011 | GGCTTGTCGACGACGGCGGTCTCCGT | 4188 |
| | CTATGCTGCC | | CGTCAGGATCATGGGCTCACTAT | |
| B_3_305_c | TCTGGGCTCA | 4011 | GGCTTGTCGACGACGGCGGTCTCCGT | 4189 |
| | CTATGCTGCC | | CGTCAGGATCATGGGCTCACTATGC | |
| B_4_326_a | CCCAGTGGG | 4012 | GGCTTGTCGACGACGGCGGTCTCCGT | 4190 |
| | ACTTTGGAA | | CGTCAGGATCATAGTGGGACT | |
| | AT | | | |
| B_4_326_b | CCCAGTGGG | 4012 | GGCTTGTCGACGACGGCGGTCTCCGT | 4191 |
| | ACTTTGGAA | | CGTCAGGATCATAGTGGGACTTTG | |
| | AT | | | |
| B_4_326_c | CCCAGTGGG | 4012 | GGCTTGTCGACGACGGCGGTCTCCGT | 4192 |
| | ACTTTGGAA | | CGTCAGGATCATAGTGGGACTTTGG | |
| | AT | | | |
| B_5_330_a | GTGGGACTTT | 4013 | GGCTTGTCGACGACGGCGGTCTCCGT | 4193 |
| | GGAAATACA | | CGTCAGGATCATGGACTTTGG | |
| | A | | | |
| B_5_330_b | GTGGGACTTT | 4013 | GGCTTGTCGACGACGGCGGTCTCCGT | 4194 |
| | GGAAATACA | | CGTCAGGATCATGGACTTTGGAA | |
| | A | | | |
| B_5_330_c | GTGGGACTTT | 4013 | GGCTTGTCGACGACGGCGGTCTCCGT | 4195 |
| | GGAAATACA | | CGTCAGGATCATGGACTTTGGAAAT | |
| | A | | | |
| B_6_414_a | CCTGACAAT | 4014 | GGCTTGTCGACGACGGCGGTCTCCGT | 4196 |
| | CGATAGGTA | | CGTCAGGATCATGACAATCGA | |
| | CC | | | |
| B_6_414_b | CCTGACAAT | 4014 | GGCTTGTCGACGACGGCGGTCTCCGT | 4197 |
| | CGATAGGTA | | CGTCAGGATCATGACAATCGATA | |
| | CC | | | |
| B_6_414_c | CCTGACAAT | 4014 | GGCTTGTCGACGACGGCGGTCTCCGT | 4198 |
| | CGATAGGTA | | CGTCAGGATCATGACAATCGATAGG | |
| | CC | | | |
| B_7_538_a | GGAATCATC | 4015 | GGCTTGTCGACGACGGCGGTCTCCGT | 4199 |
| | TTTACCAGAT | | CGTCAGGATCATATCATCTTTA | |
| | C | | | |
| B_7_538_b | GGAATCATC | 4015 | GGCTTGTCGACGACGGCGGTCTCCGT | 4200 |
| | TTTACCAGAT | | CGTCAGGATCATATCATCTTTACC | |
| | C | | | |
| B_7_538_c | GGAATCATC | 4015 | GGCTTGTCGACGACGGCGGTCTCCGT | 4201 |
| | TTTACCAGAT | | CGTCAGGATCATATCATCTTTACCAG | |
| | C | | | |
| B_8_584_a | GCAGCTCTC | 4016 | GGCTTGTCGACGACGGCGGTCTCCGT | 4202 |
| | ATTTTCCATA | | CGTCAGGATCATGCTCTCATT | |
| | C | | | |
| B_8_584_b | GCAGCTCTC | 4016 | GGCTTGTCGACGACGGCGGTCTCCGT | 4203 |
| | ATTTTCCATA | | CGTCAGGATCATGCTCTCATTTTC | |
| | C | | | |
| B_8_584_c | GCAGCTCTC | 4016 | GGCTTGTCGACGACGGCGGTCTCCGT | 4204 |
| | ATTTTCCATA | | CGTCAGGATCATGCTCTCATTTTCCA | |
| | C | | | |
| B_9_601_a | TACAGTCAG | 4017 | GGCTTGTCGACGACGGCGGTCTCCGT | 4205 |
| | TATCAATTCT | | CGTCAGGATCATAGTCAGTAT | |
| | G | | | |
| B_9_601_b | TACAGTCAG | 4017 | GGCTTGTCGACGACGGCGGTCTCCGT | 4206 |
| | TATCAATTCT | | CGTCAGGATCATAGTCAGTATCA | |
| | G | | | |
| B_9_601_c | TACAGTCAG | 4017 | GGCTTGTCGACGACGGCGGTCTCCGT | 4207 |
| | TATCAATTCT | | CGTCAGGATCATAGTCAGTATCAAT | |
| | G | | | |
| A_3_325_a | CTGGGCGGC | 4004 | ATGATCCTGACGACGGAGACCGCCGT | 4166 |
| | AGCATAGTG | | CGTCGACAAGCCGGCGGCAGC | |
| | AG | | | |
| B_6_414_b | CCTGACAAT | 4014 | GGCTTGTCGACGACGGCGGTCTCCGT | 4197 |
| | CGATAGGTA | | CGTCAGGATCATGACAATCGATA | |
| | CC | | | |
| A_5_507_c | CCCAAGTGA | 4006 | ATGATCCTGACGACGGAGACCGCCGT | 4174 |
| | TCACACTTGT | | CGTCGACAAGCCAAGTGATCACACTT | |
| | C | | | |
| A_6_510_b | CCACCCAAG | 4007 | ATGATCCTGACGACGGAGACCGCCGT | 4176 |
| | TGATCACACT | | CGTCGACAAGCCCCCAAGTGATC | |
| | T | | | |
| A_7_532_b | GGGAGAGAC | 4008 | ATGATCCTGACGACGGAGACCGCCGT | 4179 |
| | GCAAACACA | | CGTCGACAAGCCAGAGACGCAAA | |
| | GC | | | |
| B_8_584_b | GCAGCTCTC | 4016 | GGCTTGTCGACGACGGCGGTCTCCGT | 4203 |
| | ATTTTCCATA | | CGTCAGGATCATGCTCTCATTTTC | |
| | C | | | |
| A_1077c | GCAGAGCCA | 3975 | TACCGTACACCACTGAGACCGCGGTG | 4081 |
| | GGAACCCCT | | GTTGACCAGACAAACCTGGGGTTCCT | |
| | GT | | GGCT | |
| B_1154c | GTCCTTGGCA | 3989 | cTCTGGTCAACCACCGCGGTCTCAGT | 4123 |
| | AGCCCAGGA | | GGTGTACGGTACAAACCTCTGGGCTT | |
| | G | | GCCAA | |
| A_3786c | GCTGGCCCC | 3986 | TACCGTACACCACTGAGACCGCGGTG | 4114 |
| | CCACCGCCC | | GTTGACCAGACAAACCTGGCGGTGGG | |
| | CA | | GGGC | |
| B_3903c | GCGACTCCT | 4000 | TCTGGTCAACCACCGCGGTCTCAGTG | 4156 |
| | GGAAGTGGC | | GTGTACGGTACAAACCTCCACTTCCA | |
| | CA | | GGAG | |
| B_3930c | GGACTTCCC | 4001 | TCTGGTCAACCACCGCGGTCTCAGTG | 4159 |
| | AGTGTGCAT | | GTGTACGGTACAAACCTTGCACACTG | |
| | CG | | GGAA | |
| A_7_532_b | GGGAGAGAC | 4008 | ATGATCCTGACGACGGAGACCGCCGT | 4179 |
| | GCAAACACA | | CGTCGACAAGCCAGAGACGCAAA | |
| | GC | | | |
| B_8_584_b | GCAGCTCTC | 4016 | GGCTTGTCGACGACGGCGGTCTCCGT | 4203 |
| | ATTTTCCATA | | CGTCAGGATCATGCTCTCATTTTC | |
| | C | | | |
| A7_attB_30 | GGGAGAGAC | 4008 | TCCTGACGACGGAGACCGCCGTCGTC | 4208 |
| | GCAAACACA | | GACAAGCCAGAGACGCAAA | |
| | GC | | | |
| B8_attB_30 | GCAGCTCTC | 4016 | TGTCGACGACGGCGGTCTCCGTCGTC | 4209 |
| | ATTTTCCATA | | AGGATCATGCTCTCATTTTC | |
| | C | | | |
| A7_attB_20 | GGGAGAGAC | 4008 | ACGACGGAGACCGCCGTCGTCGACA | 4210 |
| | GCAAACACA | | AGCCAGAGACGCAAA | |
| | GC | | | |
| B8_attB_20 | GCAGCTCTC | 4016 | ACGACGGCGGTCTCCGTCGTCAGGAT | 4211 |
| | ATTTTCCATA | | CATGCTCTCATTTTC | |
| | C | | | |
| A7_attB_GA_38 | GGGAGAGAC | 4008 | ATGATCCTGACGACGGAGTCCGCCGT | 4212 |
| | GCAAACACA | | CGTCGACAAGCCAGAGACGCAAA | |
| | GC | | | |
| B8_attB_GA_38 | GCAGCTCTC | 4016 | GGCTTGTCGACGACGGCGGACTCCGT | 4213 |
| | ATTTTCCATA | | CGTCAGGATCATGCTCTCATTTTC | |
| | C | | | |
| A7_attB_GA_30 | GGGAGAGAC | 4008 | TCCTGACGACGGAGTCCGCCGTCGTC | 4214 |
| | GCAAACACA | | GACAAGCCAGAGACGCAAA | |
| | GC | | | |
| B8_attB_GA_30 | GCAGCTCTC | 4016 | TGTCGACGACGGCGGACTCCGTCGTC | 4215 |
| | ATTTTCCATA | | AGGATCATGCTCTCATTTTC | |
| | C | | | |
| A7_attB_GA_20 | GGGAGAGAC | 4008 | ACGACGGAGTCCGCCGTCGTCGACAA | 4216 |
| | GCAAACACA | | GCCAGAGACGCAAA | |
| | GC | | | |
| B8_attB_GA_20 | GCAGCTCTC | 4016 | ACGACGGCGGACTCCGTCGTCAGGAT | 4217 |
| | ATTTTCCATA | | CATGCTCTCATTTTC | |
| | C | | | |
| A7_attP_50 | GGGAGAGAC | 4008 | GGGTTTGTACCGTACACCACTGAGAC | 4218 |
| | GCAAACACA | | CGCGGTGGTTGACCAGACAAACCAA | |
| | GC | | GAGACGCAAA | |
| B8_attP_50 | GCAGCTCTC | 4016 | TGGTTTGTCTGGTCAACCACCGCGGT | 4219 |
| | ATTTTCCATA | | CTCAGTGGTGTACGGTACAAACCCGC | |
| | C | | TCTCATTTTC | |
| A7_attP_40 | GGGAGAGAC | 4008 | TGTACCGTACACCACTGAGACCGCGG | 4220 |
| | GCAAACACA | | TGGTTGACCAGACAAACCAAGAGAC | |
| | GC | | GCAAA | |
| B8_attP_40 | GCAGCTCTC | 4016 | TGTCTGGTCAACCACCGCGGTCTCAG | 4221 |
| | ATTTTCCATA | | TGGTGTACGGTACAAACCCGCTCTCA | |
| | C | | TTTTC | |
| A7_attP_30 | GGGAGAGAC | 4008 | CGTACACCACTGAGACCGCGGTGGTT | 4222 |
| | GCAAACACA | | GACCAGACAAACCAAGAGACGCAAA | |
| | GC | | | |
| B8_attP_30 | GCAGCTCTC | 4016 | GGTCAACCACCGCGGTCTCAGTGGTG | 4223 |
| | ATTTTCCATA | | TACGGTACAAACCCGCTCTCATTTTC | |
| | C | | | |
| A7_attP_GA_50 | GGGAGAGAC | 4008 | GGGTTTGTACCGTACACCACTGAGTC | 4224 |
| | GCAAACACA | | CGCGGTGGTTGACCAGACAAACCAA | |
| | GC | | GAGACGCAAA | |
| B8_attP_GA_50 | GCAGCTCTC | 4016 | TGGTTTGTCTGGTCAACCACCGCGGA | 4225 |
| | ATTTTCCATA | | CTCAGTGGTGTACGGTACAAACCCGC | |
| | C | | TCTCATTTTC | |
| A7_attP_GA_40 | GGGAGAGAC | 4008 | TGTACCGTACACCACTGAGTCCGCGG | 4226 |
| | GCAAACACA | | TGGTTGACCAGACAAACCAAGAGAC | |
| | GC | | GCAAA | |
| B8_attP_GA_40 | GCAGCTCTC | 4016 | TGTCTGGTCAACCACCGCGGACTCAG | 4227 |
| | ATTTTCCATA | | TGGTGTACGGTACAAACCCGCTCTCA | |
| | C | | TTTTC | |
| A7_attP_GA_30 | GGGAGAGAC | 4008 | CGTACACCACTGAGTCCGCGGTGGTT | 4228 |
| | GCAAACACA | | GACCAGACAAACCAAGAGACGCAAA | |
| | GC | | | |
| B8_attP_GA_30 | GCAGCTCTC | 4016 | GGTCAACCACCGCGGACTCAGTGGTG | 4229 |
| | ATTTTCCATA | | TACGGTACAAACCCGCTCTCATTTTC | |
| | C | | | |
| A277_b | GACTGAAAC | 4018 | AACTTCACAGAGGCTTGTCGACGACG | 4230 |
| | TTCACAGAA | | GCGGTCTCCGTCGTCAGGATCAT | |
| | TA | | | |
| A277_c | GACTGAAAC | 4018 | GAAACTTCACAGAGGCTTGTCGACGA | 4231 |
| | TTCACAGAA | | CGGCGGTCTCCGTCGTCAGGATCAT | |
| | TA | | | |
| B358_b | GATTTATGA | 4019 | GGCTTGTCGACGACGGCGGTCTCCGT | 4232 |
| | GATCAACAG | | CGTCAGGATCATCTGTTGATCTC | |
| | CAC | | | |
| B358_c | GATTTATGA | 4019 | GGCTTGTCGACGACGGCGGTCTCCGT | 4233 |
| | GATCAACAG | | CGTCAGGATCATCTGTTGATCTCAT | |
| | CAC | | | |
| A7_attB_20 | GGGAGAGAC | 4008 | ACGACGGAGACCGCCGTCGTCGACA | 4210 |
| | GCAAACACA | | AGCCAGAGACGCAAA | |
| | GC | | | |
| B8_attB_20 | GCAGCTCTC | 4016 | ACGACGGCGGTCTCCGTCGTCAGGAT | 4211 |
| | ATTTTCCATA | | CATGCTCTCATTTTC | |
| | C | | | |
| A277_c | GACTGAAAC | 4018 | GAAACTTCACAGAGGCTTGTCGACGA | 4231 |
| | TTCACAGAA | | CGGCGGTCTCCGTCGTCAGGATCAT | |
| | TA | | | |
| B358_c | GATTTATGA | 4019 | GGCTTGTCGACGACGGCGGTCTCCGT | 4233 |
| | GATCAACAG | | CGTCAGGATCATCTGTTGATCTCAT | |
| | CAC | | | |
| pU6-Sp-gRNA- | GACACCAAA | 4020 | TACCGTACACCACTGAGACCGCGGTG | 4234 |
| IDS_DF_A1_a_attP_ | AACTGCCAC | | GTTGACCAGACAAACCTGTGGCAGTT | |
| fwd.dna | AGG | | A | |
| pU6-Sp-gRNA- | GACACCAAA | 4020 | GTCTGGTCAACCACCGCGGTCTCAGT | 4235 |
| IDS_DF_A1_a_attP_ | AACTGCCAC | | GGTGTACGGTACAAACCTGTGGCAGT | |
| rev.dna | AGG | | TA | |
| pU6-Sp-gRNA- | GACACCAAA | 4020 | TACCGTACACCACTGAGACCGCGGTG | 4236 |
| IDS_DF_A1_c_attP_ | AACTGCCAC | | GTTGACCAGACAAACCTGTGGCAGTT | |
| fwd.dna | AGG | | TTA | |
| pU6-Sp-gRNA- | GACACCAAA | 4020 | GTCTGGTCAACCACCGCGGTCTCAGT | 4237 |
| IDS_DF_A1_c_attP_ | AACTGCCAC | | GGTGTACGGTACAAACCTGTGGCAGT | |
| rev.dna | AGG | | TTTA | |
| pU6-Sp-gRNA- | GCACTCATTT | 4021 | TACCGTACACCACTGAGACCGCGGTG | 4238 |
| IDS_DF_A4_b_attP_ | CCTCCAAGCT | | GTTGACCAGACAAACCTCTTGGAGGA | |
| fwd.dna | C | | AA | |
| pU6-Sp-gRNA- | GCACTCATTT | 4021 | GTCTGGTCAACCACCGCGGTCTCAGT | 4239 |
| IDS_DF_A4_b_attP_ | CCTCCAAGCT | | GGTGTACGGTACAAACCTCTTGGAGG | |
| rev.dna | C | | AAA | |
| pU6-Sp-gRNA- | GTAGGTACA | 4022 | GTCTGGTCAACCACCGCGGTCTCAGT | 4240 |
| IDS_DF_B2_a_attP_ | GGACAGGGC | | GGTGTACGGTACAAACCTCCCTGTCC | |
| fwd.dna | AG | | | |
| pU6-Sp-gRNA- | GTAGGTACA | 4022 | TACCGTACACCACTGAGACCGCGGTG | 4241 |
| IDS_DF_B2_a_attP_ | GGACAGGGC | | GTTGACCAGACAAACCTCCCTGTCC | |
| rev.dna | AG | | | |
| pU6-Sp-gRNA- | GAGATAGGT | 4023 | TCTGGTCAACCACCGCGGTCTCAGTG | 4242 |
| IDS_DF_B3_a_attP_ | AGGTACAGG | | GTGTACGGTACAAACCTCCTGTACCT | |
| fwd.dna | ACA | | | |
| pU6-Sp-gRNA- | GAGATAGGT | 4023 | TACCGTACACCACTGAGACCGCGGTG | 4243 |
| IDS_DF_B3_a_attP_ | AGGTACAGG | | GTTGACCAGACAAACCTCCTGTACCT | |
| rev.dna | ACA | | | |
| pU6-Sp-gRNA- | GTGAAAAGA | 4024 | GTCTGGTCAACCACCGCGGTCTCAGT | 4244 |
| IDS_DF_B4_b_attP_ | TAGGTAGGT | | GGTGTACGGTACAAACCTCCTACCTA | |
| fwd.dna | AC | | TCTA | |
| pU6-Sp-gRNA- | GTGAAAAGA | 4024 | TACCGTACACCACTGAGACCGCGGTG | 4245 |
| IDS_DF_B4_b_attP_ | TAGGTAGGT | | GTTGACCAGACAAACCTCCTACCTAT | |
| rev.dna | AC | | CTA | |
| pU6-Sp-gRNA- | GTTATGGTTT | 4025 | GTCTGGTCAACCACCGCGGTCTCAGT | 4246 |
| IDS_DF_B7_b_attP_ | ACTCCATCTA | | GGTGTACGGTACAAACCTATGGAGTA | |
| fwd.dna | | | AACCT | |
| pU6-Sp-gRNA- | GTTATGGTTT | 4025 | TACCGTACACCACTGAGACCGCGGTG | 4247 |
| IDS_DF_B7_b_attP_ | ACTCCATCTA | | GTTGACCAGACAAACCTATGGAGTAA | |
| rev.dna | | | ACC | |
| pU6-Sp-gRNA- | GTTTTGGTTT | 4026 | ATGATCCTGACGACGGAGACCGCCGT | 4248 |
| IDS_DF_C2_c_attB_ | ACCCTATCTA | | CGTCGACAAGCCATAGGGTAAACCA | |
| fwd.dna | | | | |
| pU6-Sp-gRNA- | GTTTTGGTTT | 4026 | GGCTTGTCGACGACGGCGGTCTCCGT | 4249 |
| IDS_DF_C2_c_attB_ | ACCCTATCTA | | CGTCAGGATCATATAGGGTAAACCA | |
| rev.dna | | | | |
| pU6-Sp-gRNA- | GCTGTGGAA | 4027 | GGCTTGTCGACGACGGCGGTCTCCGT | 4250 |
| IDS_DF_D1_b_attB_ | CTGCAACAC | | CGTCAGGATCATGTGTTGCAGT | |
| fwd.dna | ACT | | | |
| pU6-Sp-gRNA- | GCTGTGGAA | 4027 | ATGATCCTGACGACGGAGACCGCCGT | 4251 |
| IDS_DF_D1_b_attB_ | CTGCAACAC | | CGTCGACAAGCCGTGTTGCAGT | |
| rev.dna | ACT | | | |
| pU6-Sp-gRNA- | GTGCCACCT | 4028 | GGCTTGTCGACGACGGCGGTCTCCGT | 4252 |
| IDS_DF_D2_c_attB_ | AACAGTGAG | | CGTCAGGATCATCTCACTGTTAGGT | |
| fwd.dna | CTG | | | |
| pU6-Sp-gRNA- | GTGCCACCT | 4028 | ATGATCCTGACGACGGAGACCGCCGT | 4253 |
| IDS_DF_D2_c_attB_ | AACAGTGAG | | CGTCGACAAGCCCTCACTGTTAGGT | |
| rev.dna | CTG | | | |

[1903] All vectors for mammalian cell experiments were purified using Plasmid Plus Midiprep kits (Qiagen) or PureYield plasmid miniprep kits (Promega), or QIAprep Spin Miniprep kits. General mammalian cell culture conditions

[1904] HEK293T (ATCC CRL-3216), U2OS (ATTC HTB-96), K562 (CCL-243), and HeLa (CCL-2) cells were purchased from ATCC and cultured and passaged in Dulbecco's Modified Eagle's Medium (DMEM) plus GlutaMAX (ThermoFisher Scientific), McCoy's 5A Medium (Gibco), RPMI Medium 1640 plus GlutaMAX (Gibco), or Eagle's Minimal Essential Medium (EMEM, ATCC), respectively, each supplemented with 10% (v/v) fetal bovine serum (Gibco, qualified) and 1× Penicillin Streptomycin (Corning). All cell types were incubated, maintained, and cultured at 37° C. with 5% CO₂. Cell lines were authenticated by their respective suppliers and tested negative for mycoplasma.

### HEK293T, HeLa, and Huh7 Tissue Culture Transfection Protocol and Genomic DNA Preparation

[1905] HEK293T cells grown were seeded on 48-well poly-D-lysine coated plates (Corning). 16-24 h post-seeding, cells were transfected at approximately 60% confluency with 1μL of Lipofectamine 2000 (Thermo Fisher Scientific) according to the manufacturer's protocols and either: 750 ng of PE2 plasmid, 125 ng of pegRNA 1, and 125 ng of pegRNA 2 (for twinPE transfections); 750 ng of PE2 plasmid, 250 ng of pegRNA plasmid, and 83 ng of sgRNA plasmid (for PE3 transfections); or, 750 ng of Cas9 and 125 ng of sgRNA 1, and 125 ng of sgRNA 2 (for paired Cas9 nuclease transfections). Unless otherwise stated, cells were cultured 3 days following transfection, after which the media was removed, the cells were washed with 1× PBS solution (Thermo Fisher Scientific), and genomic DNA was extracted by the addition of 150 μL of freshly prepared lysis buffer (10 mM Tris-HC1, pH 7.5; 0.05% SDS; 25 μg/mL Proteinase K (ThermoFisher Scientific)) directly into each well of the tissue culture plate. The genomic DNA mixture was incubated at 37° C. for 1-2 hrs, followed by an 80° C. enzyme inactivation step for 30 min. Primers used for mammalian cell genomic DNA amplification are listed in Table 13.

TABLE 13
Sequences of primers used in this Example

| | | SEQ |
|---|---|---|
| Primers | Sequence | ID NO: |
| HEK3_fwd | ACACTCTTTCCCTACACGACGCTCTTCCGATCTNNNNATGTGGGC | 3811 |
| | TGCCTAGAAAGG | |
| HEK3_rev | TGGAGTTCAGACGTGTGCTCTTCCGATCTCCCAGCCAAACTTGTC | 3812 |
| | AACC | |
| HEK3_fwd | ACACTCTTTCCCTACACGACGCTCTTCCGATCTNNNNATGTGGGC | 3811 |
| | TGCCTAGAAAGG | |
| HEK3_rev | TGGAGTTCAGACGTGTGCTCTTCCGATCTCCCAGCCAAACTTGTC | 3812 |
| | AACC | |
| DMD_UMI_fwd1 | ACACTCTTTCCCTACACGACGCTCTTCCGATCTNNNNNNNNNNN | 4254 |
| | NNNNtgctggccagtttactaacaat | |
| DMD_UMI_fwd2 | ACACTCTTTCCCTACACGACGCTCTTCCGATCTNNNNNNNNNNN | 4255 |
| | NNNNcagaaagaagatcttatcccatcttg | |
| DMD_rev0 | TGGAGTTCAGACGTGTGCTCTTCCGATCTggctacttttgttat | 4256 |
| | ttgcatt | |
| AAVS1_AVA1713 | TGGAGTTCAGACGTGTGCTCTTCCGATCTCCAGAGCAGGGTCCC | 4257 |
| | GCTTC | |
| AAVS1_AVA1717 | ACACTCTTTCCCTACACGACGCTCTTCCGATCTNNNNACGGGGCT | 4258 |
| | CAGTCTGAAGAG | |
| AAVS1_AVA1651 | ACACTCTTTCCCTACACGACGCTCTTCCGATCTNNNNGCCAAGG | 4259 |
| | ACTCAAACCCAGA | |
| AAVS1_AVA1652 | TGGAGTTCAGACGTGTGCTCTTCCGATCTTCCGTGCGTCAGTTTT | 4260 |
| | ACCT | |
| AAVS1_AVA1653 | ACACTCTTTCCCTACACGACGCTCTTCCGATCTNNNNAACTGCTT | 4261 |
| | CTCCTCTTGGGAA | |
| AAVS1_AVA1715 | TGGAGTTCAGACGTGTGCTCTTCCGATCTTCCTTGCCAGAACCTC | 4262 |
| | TAAGGT | |
| AAVS1_AVA1655 | ACACTCTTTCCCTACACGACGCTCTTCCGATCTNNNNATCCTCTC | 4263 |
| | TGGCTCCATCGTA | |
| AAVS1_AVA1656 | TGGAGTTCAGACGTGTGCTCTTCCGATCTTCCACTTCAGGACAGC | 4264 |
| | ATGTTT | |
| AAVS1_AVA1707 | ACACTCTTTCCCTACACGACGCTCTTCCGATCTNNNNCGCCGGG | 4265 |
| | AACTGCCGCTGGC | |
| AAVS1_AVA1710 | TGGAGTTCAGACGTGTGCTCTTCCGATCTGAGGAGGCCCTCATCT | 4266 |
| | GGCG | |
| CCR5_AVA1678 | ACACTCTTTCCCTACACGACGCTCTTCCGATCTNNNNAATCAATG | 4267 |
| | TGAAGCAAATCGCAGC | |
| CCR5_AVA1679 | TGGAGTTCAGACGTGTGCTCTTCCGATCTTCGATTGTCAGGAGG | 4268 |
| | ATGATGAA | |
| CCR5_AVA1680 | ACACTCTTTCCCTACACGACGCTCTTCCGATCTNNNNTCCTTCTT | 4269 |
| | ACTGTCCCCTTCTGGGC | |
| CCR5_AVA1681 | TGGAGTTCAGACGTGTGCTCTTCCGATCTGCAAACACAGCATGG | 4270 |
| | ACGAC | |
| CCR5_AVA1682 | ACACTCTTTCCCTACACGACGCTCTTCCGATCTNNNNACAATCGA | 4271 |
| | TAGGTACCTGGCTGTC | |
| CCR5_AVA1683 | TGGAGTTCAGACGTGTGCTCTTCCGATCTACCAGCCCCAAGATG | 4272 |
| | ACTAT | |
| IDS_AVA1763 | ACACTCTTTCCCTACACGACGCTCTTCCGATCTNNNNCTGAAAAC | 4273 |
| | CTGAGCTTGGAGG | |
| IDS_AVA1764 | TGGAGTTCAGACGTGTGCTCTTCCGATCTGTCTACTCCAGCTTAA | 4274 |
| | TGGAAGTGG | |
| IDS_AVA1765 | ACACTCTTTCCCTACACGACGCTCTTCCGATCTNNNNGAGAAGA | 4275 |
| | TGTGGAAATGCCTCAC | |
| IDS_AVA1766 | TGGAGTTCAGACGTGTGCTCTTCCGATCTAATCAACATGAAGGG | 4276 |
| | TTGTGTTGT | |
| IDS_AVA1769 | ACACTCTTTCCCTACACGACGCTCTTCCGATCTNNNNGTTCCCAC | 4277 |
| | ACATGCGTTCCTC | |
| IDS_AVA1770 | TGGAGTTCAGACGTGTGCTCTTCCGATCTGGCATGAAGGGTTGTT | 4278 |
| | TTTAATTGA | |
| IDS_UMI_junc1_ | ACACTCTTTCCCTACACGACGCTCTTCCGATCTNNNNNNNNNNN | 4279 |
| fwd | NNNNGCCCTGTCCTGTACCTACCT | |
| IDS_junc2_fwd | ACACTCTTTCCCTACACGACGCTCTTCCGATCTNNNNTTCAGTTT | 4280 |
| | GGGGTATGTGCCA | |
| IDS_universal_ | TGGAGTTCAGACGTGTGCTCTTCCGATCTCTCAAATTTACCCGTG | 4281 |
| rev | GCAGC | |

[1906] For HeLa cells, they were grown and seeded with a density similar to HEK293T cells and each well of cells were transfected with 190 ng PE2_P2A_Blast (blasticidin resistence gene), 31.5 ng of pegRNA1, and 31.5 ng of pegRNA 2 (for twinPE transfections) with 0.75 uL of HeLa monster reagent (Mirus). Cells were then treated with 10 ug/mL for the seletion 24 h after transfection. The rest of genomic DNA collection steps are identical to HEK293T cells. Huh7 cells were seeded 150 k/well on 24-well poly-D-lysine coated plates (Corning). 16-24 h post-seeding, cells were transfected at high confluency with 2 μL of Lipofectamine 2000 (Thermo Fisher Scientific) according to the manufacturer's protocols and up to 800 ng of plasmid DNA. Genomic DNA collection proceeded as above for HEK293T.

### High-Throughput DNA Sequencing of Genomic DNA Samples

[1907] Genomic sites of interest were amplified from genomic DNA samples and sequenced on an Illumina MiSeq as previously described with the following modifications. Briefly, amplification primers containing Illumina forward and reverse adapters (Table 13) were used for a first round of PCR (PCR 1) amplifying the genomic region of interest. 25-μL PCR 1 reactions were performed with 0.5 μM of each forward and reverse primer, 1 μL of genomic DNA extract and 12.5 μL of Phusion U Green Multiplex PCR Master Mix. PCR reactions were carried out as follows: 98° C. for 2 min, then 30 cycles of [98° C. for 10 s, 61° C. for 20 s, and 72° C. for 30 s], followed by a final 72° C. extension for 2 min. Unique Illumina barcoding primer pairs were added to each sample in a secondary PCR reaction (PCR 2). Specifically, 25 μL of a given PCR 2 reaction contained 0.5 μM of each unique forward and reverse Illumina barcoding primer pair, 1 μL of unpurified PCR 1 reaction mixture, and 12.5 μL of Phusion U Green Multiplex PCR 2× Master Mix. The barcoding PCR 2 reactions were carried out as follows: 98° C. for 2 min, then 12 cycles of [98° C. for 10 s, 61° C. for 20 s, and 72° C. for 30 s], followed by a final 72° C. extension for 2 min. PCR products were evaluated analytically by electrophoresis in a 1.5% agarose gel. PCR 2 products (pooled by common amplicons) were purified by electrophoresis with a 1.5% agarose gel using a QlAquick Gel Extraction Kit (Qiagen), eluting with 40 μL of water. DNA concentration was measured by fluorometric quantification (Qubit, ThermoFisher Scientific) or qPCR (KAPA Library Quantification Kit-Illumina, KAPA Biosystems) and sequenced on an Illumina MiSeq instrument according to the manufacturer's protocols.

[1908] Sequencing reads were demultiplexed using MiSeq Reporter (Illumina). Alignment of amplicon sequences to a reference sequence was performed using CRISPResso2. For all prime editing yield quantification, prime editing efficiency was calculated as: % of [# of reads with the desired edit that do not contain indels]÷[# of total reads]. For quantification of point mutation editing, CRISPResso2 was run in standard mode with “discard_indel_reads” on. Prime editing for installation of point mutations was then explicitly calculated as: [frequency of specified point mutation in non-discarded reads]×[# of non-discarded reads]÷ [total reads]. For quantification of editing, CRISPResso2 was run in HDR mode using the desired allele as the expected allele (e flag), and with “discard_indel_reads” on. Editing yield was calculated as: [# of non-discarded HDR aligned reads]÷[total reads]. Indel yields were calculated as: [# of indel-containing discarded reads]÷ [total reads]. Unique molecular identifiers (UMIs) were applied to quantify the deletion efficiency and assess PCR bias in this three-step PCR protocol. Briefly, in the first step of linear amplification, 1 uL of genomic DNA extract was linearly amplified by 0.1 uM of single forward UMI primer that contains 15-bp or 16-bp unique molecular identifiers and 12.5 uL Phusion U Green Multiplex PCR Master Mix in a 25-uL reaction. The PCR products were then purified by 1.6× AmPure beads (Beckman Coulter) and eluted in 20 uL QIAGEN elution buffer. In the second step, 1 or 2 uL of linearly amplified PCR eluents were then amplified for 30 cycles with 0.5 uM of each forward and reverse primer, Phusion U Green Multiplex PCR mix in a 25-uL reaction. In this case, the forward primer anneals to the P5 Illumina adaptor sequence that locates at the 5′ of the UMI primer and upstream of UMI. The PCR products were purified by 1X ampure beads and eluted in 25 uL elution buffer. In the third step, 1 uL eluent was amplified for 12 cycles as mentioned above for adding unique Illumina barcoding. To assess the large deletion at DMD locus, the top band (unedited large amplicon) and bottom band (edited amplicons with deletions) were excised separately from the 1.5% agarose and the final library (60 pM of top bands v.s. 20 pM of bottom bands) was loaded into two separate Miseq kits to avoid weak clustering of large amplicons (˜1 kb) compared to short ones (˜300bp)

[1909] Raw sequencing reads were UMI deduplicated using AmpUMI. For paired-end reads, SeqKit was used to concatenate (merge without overlap) Rls with the reverse complement of R2s. The concatenated R1+R2s were UMI deduplicated using the UMI at the 5′ end of Rl. UMI-deduplicated Rls or concatenated R1+R2s were analyzed using CRISPResso2. For analyzing concatenated R1+R2s, an appropriate concatenated reference amplicon sequence was provided to minimize sequencing alignment artifacts due to the concatenation.

### Nucleofection of U2OS and K562

[1910] Nucleofection was performed in all experiments using K562 and U2OS cells. 200,000 cells were used per nucleofection. Counted cells were spun down and washed with PBS and then resuspended in nucleofection solution following the recommendation of Lonza SE Cell Line 4D-Nucleofector Kit. After nucleofection cells in the device, the cells were allowed to incubate in the cuvette at room temperature for 10 minutes. The contents of the cuvette were transferred to a 48 well plate filled with pre-warmed media. Genomic DNA was extracted and prepared for Illumina Miseq preparation as mentioned above.

### One-Pot TwinPE and Bxb1-Mediated Cargo Knock-in and Large Inversion:

[1911] For the one-pot mediated large inversion experiment, sequential plasmid transfection and one-pot mRNA nucleofection were performed. In the sequential plasmid transfection experiment, HEK293T cells were transfected with 750 ng PE2, 62.5 ng of each pegRNA (four in total) using Lipofectamine 2000 as mentioned above. After three days, cells were trypsinized and plated into 24-well plate and passaged for about seven days. 20K cells were then seeded again and transfected with 500 ng BxBI plasmid. Genomic DNA was extracted and prepared for Illumina Miseq preparation as mentioned above. In the one-pot mRNA nucleofection experiment, 200,000 cells were nucleofected with lug PE2 mRNA, 30 pmol each synthetic pegRNA (4 pegRNAs in total), and 750ng BxBI mRNA. Synthetic pegRNAs were order from IDT and mRNA transcripts were in vitro transcribed following the published protocol. 20 uL mixture of Lonza buffer and cells were electroporated with program CM-130 and recovered with 80 uL warmed media for five minutes. 25 uL samples from the cuvette was then added to each well of the 48-well plate and incubated at 37° C. for 72 hours.

### OTHER REFERENCES MENTIONED THROUGHOUT THIS DISCLOSURE

[1912] The following references are each incorporated herein by reference in their entireties.
[1913] 1. Jinek, M. et al. A Programmable Dual-RNA—Guided DNA Endonuclease in Adaptive Bacterial Immunity. Science 337, 816-821 (2012).
[1914] 2. Cong, L. et al. Multiplex Genome Engineering Using CRISPR/Cas Systems. Science 339, 819-823 (2013).
[1915] 3. Komor, A. C., Badran, A. H. & Liu, D. R. CRISPR-Based Technologies for the Manipulation of Eukaryotic Genomes. Cell 168, 20-36 (2017).
[1916] 4. Komor, A. C., Kim, Y. B., Packer, M. S., Zuris, J. A. & Liu, D. R. Programmable editing of a target base in genomic DNA without double-stranded DNA cleavage. Nature 533, 420-424 (2016).
[1917] 5. Nishida, K. et al. Targeted nucleotide editing using hybrid prokaryotic and vertebrate adaptive immune systems. Science 353, aaf8729 (2016).
[1918] 6. Gaudelli, N. M. et al. Programmable base editing of AT to GC in genomic DNA without DNA cleavage. Nature 551, 464-471 (2017).
[1919] 7. ClinVar, July 2019.
[1920] 8. Dunbar, C. E. et al. Gene therapy comes of age. Science 359, eaan4672 (2018).
[1921] 9. Cox, D. B. T., Platt, R. J. & Zhang, F. Therapeutic genome editing: prospects and challenges. Nat. Med. 21, 121-131 (2015).
[1922] 10. Adli, M. The CRISPR tool kit for genome editing and beyond. Nat. Commun. 9, 1911 (2018).
[1923] 11. Kleinstiver, B. P. et al. Engineered CRISPR-Cas9 nucleases with altered PAM specificities. Nature 523, 481-485 (2015).
[1924] 12. Kleinstiver, B. P. et al. High-fidelity CRISPR—Cas9 nucleases with no detectable genome-wide off-target effects. Nature 529, 490-495 (2016).
[1925] 13. Hu, J. H. et al. Evolved Cas9 variants with broad PAM compatibility and high DNA specificity. Nature 556, 57-63 (2018).
[1926] 14. Nishimasu, H. et al. Engineered CRISPR-Cas9 nuclease with expanded targeting space. Science 361, 1259-1262 (2018).
[1927] 15. Jasin, M. & Rothstein, R. Repair of strand breaks by homologous recombination. Cold Spring Harb. Perspect. Biol. 5, a012740 (2013).
[1928] 16. Paquet, D. et al. Efficient introduction of specific homozygous and heterozygous mutations using CRISPR/Cas9. Nature 533, 125-129 (2016).
[1929] 17. Kosicki, M., Tomberg, K. & Bradley, A. Repair of double-strand breaks induced by CRISPR—Cas9 leads to large deletions and complex rearrangements. Nat. Biotechnol. 36, 765-771 (2018).
[1930] 18. Haapaniemi, E., Botla, S., Persson, J., Schmierer, B. & Taipale, J. CRISPR—Cas9 genome editing induces a p53-mediated DNA damage response. Nat. Med. 24, 927-930 (2018).
[1931] 19. Ihry, R. J. et al. p53 inhibits CRISPR—Cas9 engineering in human pluripotent stem cells. Nat. Med. 24, 939-946 (2018).
[1932] 20. Richardson, C. D., Ray, G. J., DeWitt, M. A., Curie, G. L. & Corn, J. E. Enhancing homology-directed genome editing by catalytically active and inactive CRISPR-Cas9 using asymmetric donor DNA. Nat. Biotechnol. 34, 339-344 (2016).
[1933] 21. Srivastava, M. et al. An Inhibitor of Nonhomologous End-Joining Abrogates Double-Strand Break Repair and Impedes Cancer Progression. Cell 151, 1474-1487 (2012).
[1934] 22. Chu, V. T. et al. Increasing the efficiency of homology-directed repair for CRISPR-Cas9-induced precise gene editing in mammalian cells. Nat. Biotechnol. 33, 543-548 (2015).
[1935] 23. Maruyama, T. et al. Increasing the efficiency of precise genome editing with CRISPR-Cas9 by inhibition of nonhomologous end joining. Nat. Biotechnol. 33, 538-542 (2015).
[1936] 24. Kim, Y. B. et al. Increasing the genome-targeting scope and precision of base editing with engineered Cas9-cytidine deaminase fusions. Nat. Biotechnol. 35, 371-376 (2017).
[1937] 25. Li, X. et al. Base editing with a Cpf1-cytidine deaminase fusion. Nat. Biotechnol. 36, 324-327 (2018).
[1938] 26. Gehrke, J. M. et al. An APOBEC3A-Cas9 base editor with minimized bystander and off-target activities. Nat. Biotechnol. (2018). doi:10.1038/nbt.4199
[1939] 27. Rees, H. A. & Liu, D. R. Base editing: precision chemistry on the genome and transcriptome of living cells. Nat. Rev. Genet. 1 (2018). doi:10.1038/s41576-018-0059-1.
[1940] 28. Ostertag, E. M. & Kazazian Jr, H. H. Biology of Mammalian L1 Retrotransposons. Annu. Rev. Genet. 35, 501-538 (2001).
[1941] 29. Zimmerly, S., Guo, H., Perlman, P. S. & Lambowltz, A. M. Group II intron mobility occurs by target DNA-primed reverse transcription. Cell 82, 545-554 (1995).
[1942] 30. Luan, D. D., Korman, M. H., Jakubczak, J. L. & Eickbush, T. H. Reverse transcription of R2Bm RNA is primed by a nick at the chromosomal target site: a mechanism for non-LTR retrotransposition. Cell 72, 595-605 (1993).
[1943] 31. Feng, Q., Moran, J. V., Kazazian, H. H. & Boeke, J. D. Human L1 retrotransposon encodes a conserved endonuclease required for retrotransposition. Cell 87, 905-916 (1996).
[1944] 32. Jinek, M. et al. Structures of Cas9 Endonucleases Reveal RNA-Mediated Conformational Activation. Science 343, 1247997 (2014).
[1945] 33. Jiang, F. et al. Structures of a CRISPR-Cas9 R-loop complex primed for DNA cleavage. Science aad8282 (2016). doi:10.1126/science.aad8282
[1946] 34. Qi, L. S. et al. Repurposing CRISPR as an RNA-Guided Platform for Sequence-Specific Control of Gene Expression. Cell 152, 1173-1183 (2013).
[1947] 35. Tang, W., Hu, J. H. & Liu, D. R. Aptazyme-embedded guide RNAs enable ligand-responsive genome editing and transcriptional activation. Nat. Commun. 8, 15939 (2017).
[1948] 36. Shechner, D. M., Hacisuleyman, E., Younger, S. T. & Rinn, J. L. Multiplexable, locus-specific targeting of long RNAs with CRISPR-Display. Nat. Methods 12, 664-670 (2015).
[1949] 37. Anders, C. & Jinek, M. Chapter One—In vitro Enzymology of Cas9. in Methods in Enzymology (eds. Doudna, J. A. & Sontheimer, E. J.) 546, 1-20 (Academic Press, 2014).
[1950] 38. Briner, A. E. et al. Guide RNA Functional Modules Direct Cas9 Activity and Orthogonality. Mol. Cell 56, 333-339 (2014).
[1951] 39. Nowak, C. M., Lawson, S., Zerez, M. & Bleris, L. Guide RNA engineering for versatile Cas9 functionality. Nucleic Acids Res. 44, 9555-9564 (2016).
[1952] 40. Sternberg, S. H., Redding, S., Jinek, M., Greene, E. C. & Doudna, J. A. DNA interrogation by the CRISPR RNA-guided endonuclease Cas9. Nature 507, 62-67 (2014).
[1953] 41. Mohr, S. et al. Thermostable group II intron reverse transcriptase fusion proteins and their use in cDNA synthesis and next-generation RNA sequencing. RNA 19, 958-970 (2013).
[1954] 42. Stamos, J. L., Lentzsch, A. M. & Lambowitz, A. M. Structure of a Thermostable Group II Intron Reverse Transcriptase with Template-Primer and Its Functional and Evolutionary Implications. Mol. Cell 68, 926-939.e4 (2017).
[1955] 43. Zhao, C. & Pyle, A. M. Crystal structures of a group II intron maturase reveal a missing link in spliceosome evolution. Nat. Struct. Mol. Biol. 23, 558-565 (2016).
[1956] 44. Zhao, C., Liu, F. & Pyle, A. M. An ultraprocessive, accurate reverse transcriptase encoded by a metazoan group II intron. RNA 24, 183-195 (2018).
[1957] 45. Ran, F. A. et al. Genome engineering using the CRISPR-Cas9 system. Nat. Protoc. 8, 2281-2308 (2013).
[1958] 46. Liu, Y., Kao, H.-I. & Bambara, R. A. Flap endonuclease 1: a central component of DNA metabolism. Annu. Rev. Biochem. 73, 589-615 (2004).
[1959] 47. Krokan, H. E. & Bjørås, M. Base Excision Repair. Cold Spring Harb. Perspect. Biol. 5, (2013).
[1960] 48. Kelman, Z. PCNA: structure, functions and interactions. Oncogene 14, 629-640 (1997).
[1961] 49. Choe, K. N. & Moldovan, G.-L. Forging Ahead through Darkness: PCNA, Still the Principal Conductor at the Replication Fork. Mol. Cell 65, 380-392 (2017).
[1962] 50. Li, X., Li, J., Harrington, J., Lieber, M. R. & Burgers, P. M. Lagging strand DNA synthesis at the eukaryotic replication fork involves binding and stimulation of FEN-1 by proliferating cell nuclear antigen. J. Biol. Chem. 270, 22109-22112 (1995).
[1963] 51. Tom, S., Henricksen, L. A. & Bambara, R. A. Mechanism whereby proliferating cell nuclear antigen stimulates flap endonuclease 1. J. Biol. Chem. 275, 10498-10505 (2000).
[1964] 52. Tanenbaum, M. E., Gilbert, L. A., Qi, L. S., Weissman, J. S. & Vale, R. D. A protein-tagging system for signal amplification in gene expression and fluorescence imaging. Cell 159, 635-646 (2014).
[1965] 53. Bertrand, E. et al. Localization of ASH1 mRNA particles in living yeast. Mol. Cell 2, 437-445 (1998).
[1966] 54. Dahlman, J. E. et al. Orthogonal gene knockout and activation with a catalytically active Cas9 nuclease. Nat. Biotechnol. 33, 1159-1161 (2015).
[1967] 55. Tsai, S. Q. et al. GUIDE-seq enables genome-wide profiling of off-target cleavage by CRISPR-Cas nucleases. Nat. Biotechnol. 33, 187-197 (2015).
[1968] 56. Tsai, S. Q. et al. CIRCLE-seq: a highly sensitive in vitro screen for genome-wide CRISPR-Cas9 nuclease off-targets. Nat. Methods 14, 607-614 (2017).
[1969] 57. Schek N, Cooke C, Alwine JC. Molecular and Cellular Biology. (1992).
[1970] 58. Gil A, Proudfoot N J. Cell. (1987).
[1971] 59. Zhao, B. S., Roundtree, I. A., He, C. Nat Rev Mol Cell Biol. (2017).
[1972] 60. Rubio, M. A. T., Hopper, A. K. Wiley Interdiscip Rev RNA (2011).
[1973] 61. Shechner, D. M., Hacisuleyman E , Younger, S. T., Rinn, J. L. Nat Methods. (2015).
[1974] 62. Paige, J. S., Wu, K. Y., Jaffrey, S. R. Science (2011).
[1975] 63. Ray D., . . . Hughes T R. Nature (2013).
[1976] 64. Chadalavada, D. M., Cerrone-Szakal, A. L., Bevilacqua, P.C. RNA (2007).
[1977] 65. Forster A C, Symons R H. Cell. (1987).
[1978] 66. Weinberg Z, Kim P B, Chen T H, Li S, Harris K A, Lünse C E, Breaker R R. Nat. Chem. Biol. (2015).
[1979] 67. Feldstein P A, Buzayan J M, Bruening G. Gene (1989).
[1980] 68. Saville B J, Collins R A. Cell. (1990).
[1981] 69. Winkler W C, Nahvi A, Roth A, Collins J A, Breaker R R. Nature (2004).
[1982] 70. Roth A, Weinberg Z, Chen A G, Kim P G, Ames T D, Breaker R R. Nat Chem Biol. (2013).
[1983] 71. Choudhury R, Tsai Y S, Dominguez D, Wang Y, Wang Z. Nat Commun. (2012).
[1984] 72. MacRae I J, Doudna J A. Curr Opin Struct Biol. (2007).
[1985] 73. Bernstein E, Caudy A A, Hammond S M, Hannon G J Nature (2001).
[1986] 74. Filippov V, Solovyev V, Filippova M, Gill S S. Gene (2000).
[1987] 75. Cadwell R C and Joyce G F. PCR Methods Appl. (1992).
[1988] 76. McInerney P, Adams P, and Hadi M Z. Mol Biol Int. (2014).
[1989] 77. Esvelt K M, Carlson J C, and Liu D R. Nature. (2011).
[1990] 78. Naorem S S, Hin J, Wang S, Lee W R, Heng X, Miller J F, Guo H. Proc Natl Acad Sci USA (2017).
[1991] 79. Martinez M A, Vartanian J P, Wain-Hobson S. Proc Natl Acad Sci USA (1994).
[1992] 80. Meyer A J, Ellefson J W, Ellington A D. Curr Protoc Mol Biol. (2014).
[1993] 81. Wang H H, Isaacs F J, Carr P A, Sun Z Z, Xu G, Forest C R, Church G M. Nature. (2009).
[1994] 82. Nyerges A et al. Proc Natl Acad Sci USA. (2016).
[1995] 83. Mascola J R, Haynes B F. Immunol Rev. (2013).
[1996] 84. X. Wen, K. Wen, D. Cao, G. Li, R. W. Jones, J. Li, S. Szu, Y. Hoshino, L. Yuan, Inclusion of a universal tetanus toxoid CD4(+) T cell epitope P2 significantly enhanced the immunogenicity of recombinant rotavirus ΔVP8* subunit parenteral vaccines. Vaccine 32, 4420-4427 (2014).
[1997] 85. G. Ada, D. Isaacs, Carbohydrate-protein conjugate vaccines. Clin Microbiol Infect 9, 79-85 (2003).
[1998] 86. E. Malito, B. Bursulaya, C. Chen, P. L. Surdo, M. Picchianti, E. Balducci, M. Biancucci, A. Brock, F. Berti, M. J. Bottomley, M. Nissum, P. Costantino, R. Rappuoli, G. Spraggon, Structural basis for lack of toxicity of the diphtheria toxin mutant CRM197. Proceedings of the National Academy of Sciences 109, 5229 (2012).
[1999] 87. J. de Wit, M. E. Emmelot, M. C. M. Poelen, J. Lanfermeijer, W. G. H. Han, C. van Els, P. Kaaijk, The Human CD4(+) T Cell Response against Mumps Virus Targets a Broadly Recognized Nucleoprotein Epitope. J Virol 93, (2019).
[2000] 88. M. May, C. A. Rieder, R. J. Rowe, Emergent lineages of mumps virus suggest the need for a polyvalent vaccine. Int J Infect Dis 66, 1-4 (2018).
[2001] 89. M Ramamurthy, P. Rajendiran, N. Saravanan, S. Sankar, S. Gopalan, B. Nandagopal, Identification of immunogenic B-cell epitope peptides of rubella virus E1 glycoprotein towards development of highly specific immunoassays and/or vaccine. Conference Abstract, (2019).
[2002] 90. U. S. F. Tambunan, F. R. P. Sipahutar, A. A. Parikesit, D. Kerami, Vaccine Design for H5N1 Based on B- and T-cell Epitope Predictions. Bioinform Biol Insights 10, 27-35 (2016).
[2003] 91. Asante, E A. et. al. “A naturally occurring variant of the human prion protein completely prevents prion disease”. Nature. (2015).
[2004] 92. Crabtree, G. R. & Schreiber, S. L. Three-part inventions: intracellular signaling and induced proximity Trends Biochem. Sci. 21, 418-22 (1996).
[2005] 93. Liu, J. et al. Calcineurin Is a Common Target of A and FKBP-FK506 Complexes. Cell 66, 807-815 (1991). 94. Keith, C. T. et al. A mammalian protein targeted by Gl-arresting rapamycin—receptor complex. Nature 369, 756-758 (2003).
[2006] 95. Spencer, D. M., Wandless, T. J., Schreiber, S. L. S. & Crabtree, G. R. Controlling signal transduction with synthetic ligands. Science 262, 1019-24 (1993).
[2007] 96. Pruschy, M. N. et al. Mechanistic studies of a signaling pathway activated by the organic dimerizer FK1012. Chem. Biol. 1, 163-172 (1994).
[2008] 97. Spencer, D. M. et al. Functional analysis of Fas signaling in vivo using synthetic inducers of dimerization. Curr. Biol. 6, 839-847 (1996).
[2009] 98. Belshaw, P. J., Spencer, D. M., Crabtree, G. R. & Schreiber, S. L. Controlling programmed cell death with a cyclophilin-cyclosporin-based chemical inducer of dimerization. Chem. Biol. 3, 731-738 (1996).
[2010] 99. Yang, J. X., Symes, K., Mercola, M. & Schreiber, S. L Small-molecule control of insulin and PDGF receptor signaling and the role of membrane attachment. Curr. Biol. 8, 11-18 (1998).
[2011] 100. Belshaw, P. J., Ho, S. N., Crabtree, G. R. & Schreiber, S. L. Controlling protein association and subcellular localization with a synthetic ligand that induces heterodimerization of proteins. Proc. Natl. Acad. Sci. 93, 4604-4607 (2002).
[2012] 101. Stockwell, B. R. & Schreiber, S. L. Probing the role of homomeric and heteromeric receptor interactions in TGF-β signaling using small molecule dimerizers. Curr. Biol. 8, 761-773 (2004).
[2013] 102. Spencer, D. M., Graef, I., Austin, D. J., Schreiber, S. L. & Crabtree, G. R. A general strategy for producing conditional alleles of Src-like tyrosine kinases. Proc. Natl. Acad. Sci. 92, 9805-9809 (2006).
[2014] 103. Holsinger, L. J., Spencer, D. M., Austin, D. J., Schreiber, S. L. & Crabtree, G. R. Signal transduction in T lymphocytes using a conditional allele of Sos. Proc. Natl. Acad. Sci. 92, 9810-9814 (2006).
[2015] 104. Myers, M. G. Insulin Signal Transduction and the IRS Proteins. Annu. Rev. Pharmacol. Toxicol.

[2016] 36, 615-658 (1996).
[2017] 105. Watowich, S. S. The erythropoietin receptor: Molecular structure and hematopoietic signaling pathways. J. Investig. Med. 59, 1067-1072 (2011).
[2018] 106. Blau, C. A., Peterson, K. R., Drachman, J. G. & Spencer, D. M. A proliferation switch for genetically modified cells. Proc. Natl. Acad. Sci. 94, 3076-3081 (2002).
[2019] 107. Clackson, T. et al. Redesigning an FKBP-ligand interface to generate chemical dimerizers with novel specificity. Proc. Natl. Acad. Sci. 95, 10437-10442 (1998).
[2020] 108. Diver, S. T. & Schreiber, S. L. Single-step synthesis of cell-permeable protein dimerizers that activate signal transduction and gene expression. J. Am. Chem. Soc. 119, 5106-5109 (1997).
[2021] 109. Guo, Z. F., Zhang, R. & Liang, F. Sen. Facile functionalization of FK506 for biological studies by the thiol-ene ‘click’ reaction. RSC Adv. 4, 11400-11403 (2014).
[2022] 110. Robinson, D. R., Wu, Y.-M. & Lin, S.-F. The protein tyrosine kinase family of the human genome. Oncogene 19, 5548-5557 (2000).
[2023] 111. Landrum, M. J. et al. ClinVar: public archive of interpretations of clinically relevant variants. Nucleic Acids Res. 44, D862-D868 (2016).
[2024] 112. Jinek, M. et al. A Programmable Dual-RNA-Guided DNA Endonuclease in Adaptive Bacterial Immunity. Science 337,816-821 (2012).
[2025] 113. Cong, L. et al. Multiplex Genome Engineering Using CRISPR/Cas Systems. Science 339,819-823 (2013).
[2026] 114. Mali, P. et al. RNA-Guided Human Genome Engineering via Cas9. Science 339,823-826 (2013).
[2027] 115. Yang, H. et al. One-Step Generation of Mice Carrying Reporter and Conditional Alleles by CRISPR/Cas-Mediated Genome Engineering. Cell 154,1370-1379 (2013).
[2028] 116. Kim, S., Kim, D , Cho, S. W., Kim, J. & Kim, J.-S. Highly efficient RNA-guided genome editing in human cells via delivery of purified Cas9 ribonucleoproteins. Genome Res. 24,1012-1019 (2014).
[2029] 117. Orlando, S. J. et al. Zinc-finger nuclease-driven targeted integration into mammalian genomes using donors with limited chromosomal homology. Nucleic Acids Res. 38, e152-e152 (2010).
[2030] 118. Tsai, S. Q. et al. GUIDE-seq enables genome-wide profiling of off-target cleavage by CRISPR-Cas nucleases. Nat. Biotechnol. 33,187-197 (2015).
[2031] 119. Suzuki, K. et al. In vivo genome editing via CRISPR/Cas9 mediated homology-independent targeted integration. Nature 540,144-149 (2016).
[2032] 120. Kosicki, M., Tomberg, K. & Bradley, A. Repair of double-strand breaks induced by CRISPR-Cas9 leads to large deletions and complex rearrangements. Nat. Biotechnol. 36,765-771 (2018).
[2033] 121. Haapaniemi, E., Botla, S., Persson, J., Schmierer, B. & Taipale, J. CRISPR-Cas9 genome editing induces a p53-mediated DNA damage response. Nat. Med. 24,927-930 (2018).
[2034] 122. Ihry, R. J. et al. p53 inhibits CRISPR-Cas9 engineering in human pluripotent stem cells. Nat. Med. 24,939-946 (2018).
[2035] 123. Chapman, J. R., Taylor, M. R. G. & Boulton, S. J. Playing the end game: DNA double-strand break repair pathway choice. Mol. Cell 47,497-510 (2012).
[2036] 124. Cox, D. B. T., Platt, R. J. & Zhang, F. Therapeutic genome editing: prospects and challenges. Nat. Med. 21,121-131 (2015).
[2037] 125. Paquet, D. et al. Efficient introduction of specific homozygous and heterozygous mutations using CRISPR/Cas9. Nature 533,125-129 (2016).
[2038] 126. Chu, V. T. et al. Increasing the efficiency of homology-directed repair for CRISPR-Cas9-induced precise gene editing in mammalian cells. Nat. Biotechnol. 33, 543-548 (2015).
[2039] 127. Maruyama, T. et al. Increasing the efficiency of precise genome editing with CRISPR-Cas9 by inhibition of nonhomologous end joining. Nat. Biotechnol. 33, 538-542 (2015).
[2040] 128. Rees, H. A., Yeh, W.-H. & Liu, D. R. Development of hRad51—Cas9 nickase fusions that mediate HDR without double-stranded breaks. Nat. Commun. 10, 1-12 (2019).
[2041] 129. Komor, A. C., Kim, Y. B., Packer, M. S., Zuris, J. A. & Liu, D. R. Programmable editing of a target base in genomic DNA without double-stranded DNA cleavage. Nature 533, 420—424 (2016).
[2042] 130. Gaudelli, N. M. et al. Programmable base editing of A•T to G•C in genomic DNA without DNA cleavage. Nature 551, 464-471 (2017).
[2043] 131. Gao, X. et al. Treatment of autosomal dominant hearing loss by in vivo delivery of genome editing agents. Nature 553, 217-221 (2018).
[2044] 132. Ingram, V. M. A specific chemical difference between the globins of normal human and sickle-cell anaemia haemoglobin. Nature 178, 792-794 (1956).
[2045] 133. Myerowitz, R. & Costigan, F. C. The major defect in Ashkenazi Jews with Tay-Sachs disease is an insertion in the gene for the alpha-chain of beta-hexosaminidase. J. Biol. Chem. 263, 18587-18589 (1988).
[2046] 134. Zielenski, J. Genotype and Phenotype in Cystic Fibrosis. Respiration 67, 117-133 (2000).
[2047] 135. Mead, S. et al. A Novel Protective Prion Protein Variant that Colocalizes with Kuru Exposure. N. Engl. J. Med. 361, 2056-2065 (2009).
[2048] 136. Marraffini, L. A. & Sontheimer, E. J. CRISPR interference limits horizontal gene transfer in staphylococci by targeting DNA. Science 322, 1843-1845 (2008).
[2049] 137. Barrangou, R. et al. CRISPR provides acquired resistance against viruses in prokaryotes. Science 315, 1709-1712 (2007).
[2050] 138. Jiang, F. & Doudna, J. A. CRISPR—Cas9 Structures and Mechanisms. Annu. Rev. Biophys. 46, 505-529 (2017).
[2051] 139. Hille, F. et al. The Biology of CRISPR-Cas: Backward and Forward. Cell 172, 1239-1259 (2018).
[2052] 140. Luan, D. D., Korman, M. H., Jakubczak, J. L. & Eickbush, T. H. Reverse transcription of R2Bm RNA is primed by a nick at the chromosomal target site: a mechanism for non-LTR retrotransposition. Cell 72, 595-605 (1993).
[2053] 141. Liu, Y., Kao, H.-I. & Bambara, R. A. Flap endonuclease 1: a central component of DNA metabolism. Annu. Rev. Biochem. 73, 589-615 (2004).
[2054] 142. Rees, H. A. & Liu, D. R. Base editing: precision chemistry on the genome and transcriptome of living cells. Nat. Rev. Genet. 19, 770 (2018).
[2055] 143. Richardson, C. D., Ray, G. J., DeWitt, M. A., Curie, G. L. & Corn, J. E. Enhancing homology-directed genome editing by catalytically active and inactive CRISPR-Cas9 using asymmetric donor DNA. Nat. Biotechnol. 34, 339-344 (2016).
[2056] 144. Qi, L. S. et al. Repurposing CRISPR as an RNA-Guided Platform for Sequence-Specific Control of Gene Expression. Cell 152, 1173-1183 (2013).
[2057] 145. Shechner, D. M., Hacisuleyman, E., Younger, S. T. & Rinn, J. L. Multiplexable, locus-specific targeting of long RNAs with CRISPR-Display. Nat. Methods 12, 664-670 (2015).
[2058] 146. Tang, W., Hu, J. H. & Liu, D. R. Aptazyme-embedded guide RNAs enable ligand-responsive genome editing and transcriptional activation. Nat. Commun. 8, 15939 (2017).
[2059] 147. Jinek, M. et al. Structures of Cas9 Endonucleases Reveal RNA-Mediated Conformational Activation. Science 343, 1247997 (2014).
[2060] 148. Nishimasu, H. et al. Crystal Structure of Cas9 in Complex with Guide RNA and Target DNA. Cell 156, 935-949 (2014).
[2061] 149. Jiang, F., Zhou, K., Ma, L., Gressel, S. & Doudna, J. A. A Cas9-guide RNA complex preorganized for target DNA recognition. Science 348, 1477-1481 (2015).
[2062] 150. Baranauskas, A. et al. Generation and characterization of new highly thermostable and processive M-MuLV reverse transcriptase variants. Protein Eng. Des. Sel. 25, 657-668 (2012).
[2063] 151. Gerard, G. F. et al. The role of template-primer in protection of reverse transcriptase from thermal inactivation. Nucleic Acids Res. 30, 3118-3129 (2002).
[2064] 152. Arezi, B. & Hogrefe, H. Novel mutations in Moloney Murine Leukemia Virus reverse transcriptase increase thermostability through tighter binding to template-primer. Nucleic Acids Res. 37, 473-481 (2009).
[2065] 153. Kotewicz, M. L., Sampson, C. M., D′Alessio, J. M. & Gerard, G. F. Isolation of cloned Moloney murine leukemia virus reverse transcriptase lacking ribonuclease H activity. Nucleic Acids Res. 16, 265-277 (1988).
[2066] 154. Shen, M. W. et al. Predictable and precise template-free CRISPR editing of pathogenic variants. Nature 563, 646-651 (2018).
[2067] 155. Thuronyi, B. W. et al. Continuous evolution of base editors with expanded target compatibility and improved activity. Nat. Biotechnol. (2019). doi:10.1038/s41587-019-0193-0
[2068] 156. Kim, Y. B. et al. Increasing the genome-targeting scope and precision of base editing with engineered Cas9-cytidine deaminase fusions. Nat. Biotechnol. 35, 371-376 (2017).
[2069] 157. Koblan, L. W. et al. Improving cytidine and adenine base editors by expression optimization and ancestral reconstruction. Nat. Biotechnol. (2018). doi:10.1038/nbt.4172
[2070] 158. Komor, A. C. et al. Improved base excision repair inhibition and bacteriophage Mu Gam protein yields C:G-to-T:A base editors with higher efficiency and product purity. Sci. Adv. 3, eaao4774 (2017).
[2071] 159. Kleinstiver, B. P. et al. High-fidelity CRISPR-Cas9 nucleases with no detectable genome-wide off-target effects. Nature 529, 490-495 (2016).
[2072] 160. Zuo, E. et al. Cytosine base editor generates substantial off-target single-nucleotide variants in mouse embryos. Science 364, 289-292 (2019).
[2073] 161. Jin, S. et al. Cytosine, but not adenine, base editors induce genome-wide off-target mutations in rice. Science 364, 292-295 (2019).
[2074] 162. Kim, D., Kim, D., Lee, G., Cho, S.-I. & Kim, J.-S. Genome-wide target specificity of CRISPR RNA-guided adenine base editors. Nat. Biotechnol. 37, 430-435 (2019).
[2075] 163. Grunewald, J. et al. Transcriptome-wide off-target RNA editing induced by CRISPR-guided DNA base editors. Nature 569, 433-437 (2019).
[2076] 164. Zhou, C. et al. Off-target RNA mutation induced by DNA base editing and its elimination by mutagenesis. Nature 571, 275-278 (2019).
[2077] 165. Rees, H. A., Wilson, C., Doman, J. L. & Liu, D. R. Analysis and minimization of cellular RNA editing by DNA adenine base editors. Sci. Adv. 5, eaax5717 (2019).
[2078] 166. Ostertag, E. M. & Kazazian Jr, H. H. Biology of Mammalian L1 Retrotransposons. Annu. Rev. Genet. 35, 501-538 (2001).
[2079] 167. Griffiths, D. J. Endogenous retroviruses in the human genome sequence. Genome Biol. 2, REVIEWS1017 (2001).
[2080] 168. Berkhout, B., Jebbink, M. & Zsíros, J. Identification of an Active Reverse Transcriptase Enzyme Encoded by a Human Endogenous HERV-K Retrovirus. J. Virol. 73, 2365-2375 (1999).
[2081] 169. Halvas, E. K., Svarovskaia, E. S. & Pathak, V. K. Role of Murine Leukemia Virus Reverse Transcriptase Deoxyribonucleoside Triphosphate-Binding Site in Retroviral Replication and In Vivo Fidelity. J. Virol. 74, 10349-10358 (2000).
[2082] 170. Dever, D. P. et al. CRISPR/Cas9 Beta-globin Gene Targeting in Human Hematopoietic Stem Cells. Nature 539, 384-389 (2016).
[2083] 171. Park, S. H. et al. Highly efficient editing of the β-globin gene in patient-derived hematopoietic stem and progenitor cells to treat sickle cell disease. Nucleic Acids Res. doi:10.1093/nar/gkz475
[2084] 172. Collinge, J. Prion diseases of humans and animals their causes and molecular basis. Annu. Rev. Neurosci. 24, 519-550 (2001).
[2085] 173. Asante, E. A. et al. A naturally occurring variant of the human prion protein completely prevents prion disease. Nature 522, 478-481 (2015).
[2086] 174. Anzalone, A. V., Lin, A. J., Zairis, S., Rabadan, R. & Cornish, V. W. Reprogramming eukaryotic translation with ligand-responsive synthetic RNA switches. Nat. Methods 13, 453-458 (2016).
[2087] 175. Badran, A. H. et al. Continuous evolution of Bacillus thuringiensis toxins overcomes insect resistance. Nature 533, 58-63 (2016).
[2088] 176. Anders, C. & Jinek, M. Chapter One—In Vitro Enzymology of Cas9. in Methods in Enzymology (eds. Doudna, J. A. & Sontheimer, E. J.) 546, 1-20 (Academic Press, 2014).
[2089] 177. Pirakitikulr, N., Ostrov, N., Peralta-Yahya, P. & Cornish, V. W. PCRless library mutagenesis via oligonucleotide recombination in yeast. Protein Sci. Publ. Protein Soc. 19, 2336-2346 (2010).
[2090] 178. Clement, K. et al. CRISPResso2 provides accurate and rapid genome editing sequence analysis. Nat. Biotechnol. 37, 224-226 (2019).
[2091] 179. Tsai, S. Q. et al. GUIDE-seq enables genome-wide profiling of off-target cleavage by CRISPR-Cas nucleases. Nat. Biotechnol. 33, 187-197 (2015).
[2092] 180. Kleinstiver, B. P. et al. High-fidelity CRISPR-Cas9 nucleases with no detectable genome-wide off-target effects. Nature 529, 490-495 (2016).
[2093] 181. Koblan, L. W. et al. Improving cytidine and adenine base editors by expression optimization and ancestral reconstruction. Nat. Biotechnol. (2018). doi:10.1038/nbt.4172
[2094] 182. Baranauskas, A. et al. Generation and characterization of new highly thermostable and processive M-MuLV reverse transcriptase variants. Protein Eng. Des. Sel. 25, 657-668 (2012).
[2095] 183. Schechner, D M, Hacisuleyman E., Younger S T, Rinn J L. Nat Methods 664-70 (2015).
[2096] 184. Brown J A, et al. Nat Struct Mol Biol 633-40 (2014).
[2097] 185. Conrad N A and Steitz J A. EMBO J 1831-41 (2005).
[2098] 186. Bartlett J S, et al. Proc Natl Acad Sci USA 8852-7 (1996).
[2099] 187. Mitton-Fry R M, DeGregorio S J, Wang J, Steitz T A, Steitz J A. Science 1244-7 (2010).
[2100] 188. Forster A C, Symons RH. Cell. 1987.
[2101] 189. Weinberg Z, Kim P B, Chen T H, Li S, Harris K A, Lünse C E, Breaker R R. Nat. Chem. Biol. 2015.
[2102] 190. Feldstein P A, Buzayan JM, Bruening G. Gene 1989.
[2103] 191. Saville B J, Collins R A. Cell. 1990.
[2104] 192. Roth A, Weinberg Z, Chen A G, Kim P G, Ames T D, Breaker R R. Nat Chem Biol. 2013.
[2105] 193. Borchardt E K, et al. RNA 1921-30 (2015).
[2106] 194. Zhang Y, et al. Mol Cell 792-806 (2013).
[2107] 195. Dang Y, et al. Genome Biol 280 (2015).
[2108] 196. Schaefer M, Kapoor U, and Jantsch M F. Open Biol 170077 (2017).
[2109] 197. Nahar S, et al. Chem Comm 2377-80 (2018).
[2110] 198. Gao Y and Zhao Y. J Integr Plant Biol 343-9 (2014).
[2111] 199. Dubois N, Marquet R, Paillart J, Bernacchi S. Front Microbiol 527 (2018).
[2112] 200. Costa M and Michel F. EMBO J 1276-85 (1995).
[2113] 201. Hu JH, et al. Nature 57-63 (2018).
[2114] 202. Furukawa K, Gu H, Breaker R R. Methods Mol Biol 209-20 (2014).
[2115] 203. Zettler, J., Schutz, V. & Mootz, H. D. The naturally split Npu DnaE intein exhibits an extraordinarily high rate in the protein trans-splicing reaction. FEBS Lett. 583,909-914 (2009).
[2116] 204. Kugler, S., Kilic, E. & Bahr, M. Human synapsin 1 gene promoter confers highly neuron-specific long-term transgene expression from an adenoviral vector in the adult rat brain depending on the transduced area. Gene Ther. 10,337-347 (2003).
[2117] 205. de Felipe, P., Hughes, L. E., Ryan, M. D. & Brown, J. D. Co-translational, intraribosomal cleavage of polypeptides by the foot-and-mouth disease virus 2A peptide. J. Biol. Chem. 278, 11441-11448 (2003).
[2118] 206. Levy, J. M. & Nicoll, R. A. Membrane-associated guanylate kinase dynamics reveal regional and developmental specificity of synapse stability. J. Physiol. 595,1699-1709 (2017).
[2119] 207. Li, B. & Dewey, C. N. RSEM: accurate transcript quantification from RNA-Seq data with or without a reference genome. BMC Bioinformatics 12,323 (2011).
[2120] 208. Ritchie, M. E. et al. limma powers differential expression analyses for RNA-sequencing and microarray studies. Nucleic Acids Res. 43, e47—e47 (2015).

### Equivalents and Scope

[2121] In the articles such as “a,” “an,” and “the” may mean one or more than one unless indicated to the contrary or otherwise evident from the context. Embodiments or descriptions that include “or” between one or more members of a group are considered satisfied if one, more than one, or all of the group members are present in, employed in, or otherwise relevant to a given product or process unless indicated to the contrary or otherwise evident from the context. The invention includes embodiments in which exactly one member of the group is present in, employed in, or otherwise relevant to a given product or process. The invention includes embodiments in which more than one, or all of the group members are present in, employed in, or otherwise relevant to a given product or process.

[2122] Furthermore, the disclosure encompasses all variations, combinations, and permutations in which one or more limitations, elements, clauses, and descriptive terms from one or more of the listed claims is introduced into another claim. For example, any claim that is dependent on another claim can be modified to include one or more limitations found in any other claims that is dependent on the same base claim. Where elements are presented as lists, e.g., in Markush group format, each subgroup of the elements is also disclosed, and any element(s) can be removed from the group. It should it be understood that, in general, where the invention, or aspects of the invention, is/are referred to as comprising particular elements and/or features, certain embodiments of the disclosure or aspects of the disclosure consist, or consist essentially of, such elements and/or features. For purposes of simplicity, those embodiments have not been specifically set forth in haec verba herein. It is also noted that the terms “comprising” and “containing” are intended to be open and permits the inclusion of additional elements or steps. Where ranges are given, endpoints are included. Furthermore, unless otherwise indicated or otherwise evident from the context and understanding of one of ordinary skill in the art, values that are expressed as ranges can assume any specific value or sub—range within the stated ranges in different embodiments of the invention, to the tenth of the unit of the lower limit of the range, unless the context clearly dictates otherwise.

[2123] This application refers to various issued patents, published patent applications, journal articles, and other publications, all of which are incorporated herein by reference. If there is a conflict between any of the incorporated references and the instant specification, the specification shall control. In addition, any particular embodiment of the present invention that falls within the prior art may be explicitly excluded from any one or more of the embodiments. Because such embodiments are deemed to be known to one of ordinary skill in the art, they may be excluded even if the exclusion is not set forth explicitly herein. Any particular embodiment of the invention can be excluded from any embodiment, for any reason, whether or not related to the existence of prior art.

[2124] Those skilled in the art will recognize or be able to ascertain using no more than routine experimentation many equivalents to the specific embodiments described herein. The scope of the present embodiments described herein is not intended to be limited to the above Description, but rather is as set forth in the appended embodiments. Those of ordinary skill in the art will appreciate that various changes and modifications to this description may be made without departing from the spirit or scope of the present invention, as defined in the following embodiments.

1. A system for simultaneously editing both strands of a double-stranded DNA sequence at a target site to be edited, wherein the system comprises a first prime editor complex and a second prime editor complex, wherein each of the first and second prime editor complexes comprises (1) a prime editor comprising (i) a nucleic acid programmable DNA binding protein (na.pDNAbp), and (ii) a polypeptide having an RNA-dependent DNA polymerase activity; and (2) a pegRNA comprising a spacer sequence, gRNA core, a DNA synthesis template, and a primer binding site, wherein the DNA synthesis template of the pegRNA of the first prime editor complex encodes a first single-stranded DNA sequence and the DNA synthesis template of the pegRNA of the second prime editor complex encodes a second single-stranded DNA sequence, wherein the first single-stranded DNA sequence and the second single-stranded DNA sequence each comprises a region of complementarity to the other, and wherein the first single-stranded DNA sequence and the second single-stranded DNA sequence form a duplex comprising an edited portion as compared to the DNA sequence at the target site to be edited, which integrates into the target site to be edited.

2. The system of claim 1, wherein the prime editor of the first prime editor complex, the second prime editor complex, or both the first prime editor complex and the second prime editor complex is a fusion protein comprising the napDNAbp and the polypeptide having an RNA-dependent DNA polymerase activity.

3. The system of claim 1, wherein the first prime editor complex and the second prime editor complex comprise the same prime editor.

4. The system of claim 1, wherein the first prime editor complex and the second prime editor complex comprise different prime editors.

5. The system of claim 1, wherein the napDNAbp is a Cas9 domain or variant thereof.

6. The system of claim 1, wherein the napDNAbp is a nuclease active Cas9 domain, a nuclease inactive Cas9 domain, a Cas9 nickase domain, or variant thereof.

7. The system of claim 1, wherein the napDNAbp is selected from the group consisting of: Cas9, Cas12e, Cas12d, Cas12a, Cas12b1, Cas 13a, Cas12c, CasX, CasY, and Argonaute.

8. The system of claim 1, wherein the napDNAbp has nickase activity.

9. The system of claim 1, wherein the napDNAbp comprises an amino acid sequence of any one of SEQ ID NOs: 18-88, or an amino acid sequence having at least 80%, sequence identity with any one of SEQ ID NOs: 18-88.

10. The system of claim 1, wherein the polypeptide having an RNA-dependent DNA polymerase activity is a reverse transcriptase.

11. The system of claim 1, wherein the polypeptide having an RNA-dependent DNA polymerase activity comprises an amino acid sequence of any one of SEQ ID NOs: 89-100 105-122 128-129 132,139, 143, 149 154, 159, and 700-766, or an amino acid sequence having at least 80%, sequence identity any one of SEQ ID NOs: 89-100, 105-122, 128-129, and 132.

12. The system of claim 2, wherein the prime editor of the first prime editor complex, the second prime editor complex, or both the first prime editor complex and the second prime editor complex further comprises a linker that joins the napDNAbp and the polypeptide having the RNA-dependent DNA polymerase activity.

13. The system of claim 12, wherein the linker comprises an amino acid sequence of any one of SEQ ID NOs: 166-177, or an amino acid sequence having at least 80%, sequence identity with any one of SEQ ID NOs: 166-177.

14. The system of claim 12, wherein the linker is 1, 2, 3, 4, 5, 6, 7, 8, 9, 10, 11, 12, 13, 14, 15, 16, 17, 18, 19, 20, 21, 22, 23, 24, 25, 26, 27, 28, 29, 30, 31, 32, 33, 34, 35, 36, 37, 38, 39, 40, 41, 42, 43, 44, 45, 46, 47, 48, 49, or 50 amino acids in length.

15. The system of claim 1, wherein the pegRNA of the first prime editor complex, the second prime editor complex, or both the first prime editor complex and the second prime editor complex comprises a nucleotide sequence of any one of SEQ II) NOs: 325-330, 499-505, 101-104, 181-183, and 223-244, or a nucleotide sequence having at least 80%, sequence identity with any one of SEQ 1D NOs: 325-330, 499-505, 101-104, 181-183, and 223-244.

16. The system of claim 1, wherein the spacer sequence of the pegRNA of the first prime editor complex hinds to a first binding site on a first strand of the double-stranded DNA sequence upstream from the target site to be edited.

17. The system of claim 1, wherein the spacer sequence of the pegRNA of the second prime editor complex binds to a second binding site on a second strand of the double-stranded DNA sequence downstream from the target site to be edited.

18. The system of claim 17, whereby the binding of the spacer sequence of the pegRNAs of the first and second prime editor complexes in the presence of a PAM sequence results in the nicking of the first and second strands, respectively, at a nick site proximal to the PAM sequences on each strand by the n.apDNAbps of each of the first and second prime editor complex.

19-72. (canceled)

73. A method for simultaneously editing a first and a second complementary strand of a double-stranded DNA sequence at a target site, said method comprising contacting the double-stranded DNA sequence with a pair of prime editor complexes, said pair comprising:
a. a first prime editor complex, comprising:
i. a first prime editor comprising a first nucleic acid programmable DNA binding protein (napDNAbp) and a first polypeptide comprising an RNA-dependent DNA polymerase activity; and
ii. a first prime editing guide RNA (first PEgRNA) that binds to a first binding site on the first strand of the DNA sequence upstream of the target site;
b. a second prime editor complex, comprising:
i. a second prime editor comprising a second nucleic acid programmable DNA binding protein (second napDNAbp) and a second polypeptide comprising an RNA-dependent DNA polymerase activity; and
ii. a second prime editing guide RNA (second PEgRNA) that binds to a second binding site on the second strand of the DNA sequence downstream of the target site;
wherein the first prime editor complex causes a first nick at a sequence complementary to the first binding site and the subsequent polymerization of a first single-stranded DNA sequence having a 3′-end from the available 5′-end formed by the first nick;
wherein the second prime editor complex causes a second nick at a sequence complementary to the second binding site and the subsequent polymerization of a second single-stranded DNA sequence having a 3′-end from the available 5′-end formed by the second nick;
wherein the first single-stranded DNA sequence and the second single-stranded DNA sequence are reverse complements over at least a region of complementarity and form a duplex comprising an edit; and
wherein the duplex replaces the nicked first and second complementary strands of the double-stranded DNA sequence.

74-104. (canceled)

105. A pair of pegRNAs for use in dual prime editing, wherein the pair comprises:
a. a first prime editing guide RNA (first PEgRNA) that binds to a first binding site on a first strand of a double-stranded DNA sequence upstream of a target site to be edited, wherein the first PEgRNA comprises a first spacer sequence, a first gRNA core, a first DNA synthesis template, and a first primer binding site, wherein the first DNA synthesis template encodes a first single-stranded DNA sequence comprising an edited portion;
b. a second prime editing guide RNA (second PEgRNA) that binds to a second binding site on a second strand of the double-stranded DNA sequence downstream of the target site to be edited, wherein the second PEgRNA comprises a second spacer sequence, a second gRNA core, a second DNA synthesis template, and a second primer binding site, wherein the second DNA synthesis template encodes a second single-stranded DNA sequence comprising the edited portion, wherein the second single-stranded DNA sequence comprises a region of complementarity to the first single-stranded DNA sequence.

106-232. (canceled)

The application's sequence listing, which the Patent Office published only in electronic form, follows.

SEQUENCE LISTING (4359 sequences)

SEQ ID NO: 1 - protein, 12 aa, synthetic construct
  REGION 1..12: note = Synthetic
FLNCCPGCCMEP

SEQ ID NO: 2 - protein, 8 aa, synthetic construct
  REGION 1..8: note = Synthetic
DYKDDDDK

SEQ ID NO: 3 - protein, 14 aa, synthetic construct
  REGION 1..14: note = Synthetic
GKPIPNPLLGLDST

SEQ ID NO: 4 - protein, 19 aa, synthetic construct
  REGION 1..19: note = Synthetic
EELLSKNYHLENEVARLKK

SEQ ID NO: 5 - protein, 9 aa, synthetic construct
  REGION 1..9: note = Synthetic
YPYDVPDYA

SEQ ID NO: 6 - protein, 10 aa, synthetic construct
  REGION 1..10: note = Synthetic
EQKLISEEDL

SEQ ID NO: 7 - protein, 380 aa, Homo sapiens
MGIQGLAKLIADVAPSAIRENDIKSYFGRKVAIDASMSIYQFLIAVRQGGDVLQNEEGETTSHLMGMFYRTIRMMENGIKPVYVFDGKPPQLKSGELAKRSERRAEAEKQLQQAQAAGAEQEVEKFTKRLVKVTKQHNDECKHLLSLMGIPYLDAPSEAEASCAALVKAGKVYAAATEDMDCLTFGSPVLMRHLTASEAKKLPIQEFHLSRILQELGLNQEQFVDLCILLGSDYCESIRGIGPKRAVDLIQKHKSIEEIVRRLDPNKYPVPENWLHKEAHQLFLEPEVLDPESVELKWSEPNEEELIKFMCGEKQFSEERIRSGVKRLSKSRQGSTQGRLDDFFKVTGSLSSAKRKEPEPKGSTKKKAKTGAAGKFKRGK

SEQ ID NO: 8 - protein, 413 aa, synthetic construct
  REGION 1..413: note = Synthetic
CLAEGTRIFDPVTGTTHRIEDVVDGRKPIHVVAAAKDGTLLARPVVSWFDQGTRDVIGLRIAGGAIVWATPDHKVLTEYGWRAAGELRKGDRVAGPGGSGNSLALSLTADQMVSALLDAEPPILYSEYDPTSPFSEASMMGLLTNLADRELVHMINWAKRVPGFVDLTLHDQAHLLECAWLEILMIGLVWRSMEHPGKLLFAPNLLLDRNQGKCVEGMVEIFDMLLATSSRFRMMNLQGEEFVCLKSIILLNSGVYTFLSSTLKSLEEKDHIHRALDKITDTLIHLMAKAGLTLQQQHQRLAQLLLILSHIRHMSNKGMEHLYSMKYKNVVPLYDLLLEMLDAHRLHAGGSGASRVQAFADALDDKFLHDMLAEELRYSVIREVLPTRRARTFDLEVEELHTLVAEGVVVHNC

SEQ ID NO: 9 - protein, 413 aa, synthetic construct
  REGION 1..413: note = Synthetic
CLAEGTRIFDPVTGTTHRIEDVVDGRKPIHVVAVAKDGTLLARPVVSWFDQGTRDVIGLRIAGGAIVWATPDHKVLTEYGWRAAGELRKGDRVAGPGGSGNSLALSLTADQMVSALLDAEPPILYSEYDPTSPFSEASMMGLLTNLADRELVHMINWAKRVPGFVDLTLHDQAHLLECAWLEILMIGLVWRSMEHPGKLLFAPNLLLDRNQGKCVEGMVEIFDMLLATSSRFRMMNLQGEEFVCLKSIILLNSGVYTFLSSTLKSLEEKDHIHRALDKITDTLIHLMAKAGLTLQQQHQRLAQLLLILSHIRHMSNKGMEHLYSMKYTNVVPLYDLLLEMLDAHRLHAGGSGASRVQAFADALDDKFLHDMLAEELRYSVIREVLPTRRARTFDLEVEELHTLVAEGVVVHNC

SEQ ID NO: 10 - protein, 413 aa, synthetic construct
  REGION 1..413: note = Synthetic
CLAEGTRIFDPVTGTTHRIEDVVDGRKPIHVVAAAKDGTLLARPVVSWFDQGTRDVIGLRIAGGATVWATPDHKVLTEYGWRAAGELRKGDRVAGPGGSGNSLALSLTADQMVSALLDAEPPIPYSEYDPTSPFSEASMMGLLTNLADRELVHMINWAKRVPGFVDLTLHDQAHLLECAWLEILMIGLVWRSMEHPGKLLFAPNLLLDRNQGKCVEGMVEIFDMLLATSSRFRMMNLQGEEFVCLKSIILLNSGVYTFLSSTLKSLEEKDHIHRALDKITDTLIHLMAKAGLTLQQQHQRLAQLLLILSHIRHMSNKGMEHLYSMKYKNVVPLYDLLLEMLDAHRLHAGGSGASRVQAFADALDDKFLHDMLAEGLRYSVIREVLPTRRARTFDLEVEELHTLVAEGVVVHNC

SEQ ID NO: 11 - protein, 413 aa, synthetic construct
  REGION 1..413: note = Synthetic
CLAEGTRIFDPVTGTTHRIEDVVDGRKPIHVVAAAKDGTLLARPVVSWFDQGTRDVIGLRIAGGATVWATPDHKVLTEYGWRAAGELRKGDRVAGPGGSGNSLALSLTADQMVSALLDAEPPILYSEYDPTSPFSEASMMGLLTNLADRELVHMINWAKRVPGFVDLTLHDQAHLLECAWLEILMIGLVWRSMEHPGKLLFAPNLLLDRNQGKCVEGMVEIFDMLLATSSRFRMMNLQGEEFVCLKSIILLNSGVYTFLSSTLKSLEEKDHIHRALDKITDTLIHLMAKAGLTLQQQHQRLAQLLLILSHIRHMSNKGMEHLYSMKYKNVVPLYDLLLEMLDAHRLHAGGSGASRVQAFADALDDKFLHDMLAEELRYSVIREVLPTRRARTFDLEVEELHTLVAEGVVVHNC

SEQ ID NO: 12 - protein, 413 aa, synthetic construct
  REGION 1..413: note = Synthetic
CLAEGTRIFDPVTGTTHRIEDVVDGRKPIHVVAAAKDGTLLARPVVSWFDQGTRDVIGLRIAGGATVWATPDHKVLTEYGWRAAGELRKGDRVAGPGGSGNSLALSLTADQMVSALLDAEPPIPYSEYDPTSPFSEASMMGLLTNLADRELVHMINWAKRVPGFVDLTLHDQAHLLECAWLEILMIGLVWRSMEHPGKLLFAPNLLLDRNQGKCVEGMVEIFDMLLATSSRFRMMNLQGEEFVCLKSIILLNSGVYTFLSSTLKSLEEKDHIHRALDKITDTLIHLMAKAGLTLQQQHQRLAQLLLILSHIRHMSNKGMEHLYSMKYKNVVPLYDLLLEMLDAHRLHAGGSGASRVQAFADALDDKFLHDMLAEELRYSVIREVLPTRRARTFDLEVEELHTLVAEGVVVHNC

SEQ ID NO: 13 - protein, 413 aa, synthetic construct
  REGION 1..413: note = Synthetic
CLAEGTRIFDPVTGTTHRIEDVVDGRKPIHVVAAAKDGTLLARPVVSWFDQGTRDVIGLRIAGGATVWATPDHKVLTEYGWRAAGELRKGDRVAGPGGSGNSLALSLTADQMVSALLDAEPPILYSEYNPTSPFSEASMMGLLTNLADRELVHMINWAKRVPGFVDLTLHDQAHLLERAWLEILMIGLVWRSMEHPGKLLFAPNLLLDRNQGKCVEGMVEIFDMLLATSSRFRMMNLQGEEFVCLKSIILLNSGVYTFLSSTLKSLEEKDHIHRALDKITDTLIHLMAKAGLTLQQQHQRLAQLLLILSHIRHMSNKGMEHLYSMKYKNVVPLYDLLLEMLDAHRLHAGGSGASRVQAFADALDDKFLHDMLAEGLRYSVIREVLPTRRARTFDLEVEELHTLVAEGVVVHNC

SEQ ID NO: 14 - protein, 413 aa, synthetic construct
  REGION 1..413: note = Synthetic
CLAEGTRIFDPVTGTTHRIEDVVDGRKPIHVVAAAKDGTLLARPVVSWFDQGTRDVIGLRIAGGAIVWATPDHKVLTEYGWRAAGELRKGDRVAGPGGSGNSLALSLTADQMVSALLDAEPPILYSEYDPTSPFSEASMMGLLTNLADRELVHMINWAKRVPGFVDLTLHDQAHLLERAWLEILMIGLVWRSMEHPGKLLFAPNLLLDRNQGKCVEGMVEIFDMLLATSSRFRMMNLQGEEFVCLKSIILLNSGVYTFLSSTLKSLEEKDHIHRALDKITDTLIHLMAKAGLTLQQQHQRLAQLLLILSHIRHMSNKGMEHLYSMKYKNVVPLYDLLLEMLDAHRLHAGGSGASRVQAFADALDDKFLHDMLAEGLRYSVIREVLPTRRARTFDLEVEELHTLVAEGVVVHNC

SEQ ID NO: 15 - protein, 413 aa, synthetic construct
  REGION 1..413: note = Synthetic
CLAEGTRIFDPVTGTTHRIEDVVDGRKPIHVVAVAKDGTLLARPVVSWFDQGTRDVIGLRIAGGATVWATPDHKVLTEYGWRAAGELRKGDRVAGPGGSGNSLALSLTADQMVSALLDAEPPILYSEYDPTSPFSEASMMGLLTNLADRELVHMINWAKRVPGFVDLTLHDQAHLLERAWLEILMIGLVWRSMEHPGKLLFAPNLLLDRNQGKCVEGMVEIFDMLLATSSRFRMMNLQGEEFVCLKSIILLNSGVYTFLSSTLKSLEEKDHIHRALDKITDTLIHLMAKAGLTLQQQHQRLAQLLLILSHIRHMSNKGMEHLYSMKYKNVVPLYDLLLEMLDAHRLHAGGSGASRVQAFADALDDKFLHDMLAEELRYSVIREVLPTRRARTFDLEVEELHTLVAEGVVVHNC

SEQ ID NO: 16 - protein, 7 aa, synthetic construct
  REGION 1..7: note = Synthetic
PKKKRKV

SEQ ID NO: 17 - protein, 30 aa, synthetic construct
  REGION 1..30: note = Synthetic
MDSLLMNRRKFLYQFKNVRWAKGRRETYLC

SEQ ID NO: 18 - protein, 1368 aa, Streptococcus pyogenes [sequence omitted]

SEQ ID NO: 19 - DNA, 4104 bp, Streptococcus pyogenes
  source 1..4104: mol_type = genomic DNA
atggataaaaaatatagcattggcctggatattggcaccaacagcgtgggctgggcggtgattaccgatgaatataaagtgccgagcaaaaaatttaaagtgctgggcaacaccgatcgccatagcattaaaaaaaacctgattggcgcgctgctgtttgatagcggcgaaaccgcggaagcgacccgcctgaaacgcaccgcgcgccgccgctatacccgccgcaaaaaccgcatttgctatctgcaggaaatttttagcaacgaaatggcgaaagtggatgatagcttttttcatcgcctggaagaaagctttctggtggaagaagataaaaaacatgaacgccatccgatttttggcaacattgtggatgaagtggcgtatcatgaaaaatatccgaccatttatcatctgcgcaaaaaactggtggatagcaccgataaagcggatctgcgcctgatttatctggcgctggcgcatatgattaaatttcgcggccattttctgattgaaggcgatctgaacccggataacagcgatgtggataaactgtttattcagctggtgcagacctataaccagctgtttgaagaaaacccgattaacgcgagcggcgtggatgcgaaagcgattctgagcgcgcgcctgagcaaaagccgccgcctggaaaacctgattgcgcagctgccgggcgaaaaaaaaaacggcctgtttggcaacctgattgcgctgagcctgggcctgaccccgaactttaaaagcaactttgatctggcggaagatgcgaaactgcagctgagcaaagatacctatgatgatgatctggataacctgctggcgcagattggcgatcagtatgcggatctgtttctggcggcgaaaaacctgagcgatgcgattctgctgagcgatattctgcgcgtgaacaccgaaattaccaaagcgccgctgagcgcgagcatgattaaacgctatgatgaacatcatcaggatctgaccctgctgaaagcgctggtgcgccagcagctgccggaaaaatataaagaaattttttttgatcagagcaaaaacggctatgcgggctatattgatggcggcgcgagccaggaagaattttataaatttattaaaccgattctggaaaaaatggatggcaccgaagaactgctggtgaaactgaaccgcgaagatctgctgcgcaaacagcgcacctttgataacggcagcattccgcatcagattcatctgggcgaactgcatgcgattctgcgccgccaggaagatttttatccgtttctgaaagataaccgcgaaaaaattgaaaaaattctgacctttcgcattccgtattatgtgggcccgctggcgcgcggcaacagccgctttgcgtggatgacccgcaaaagcgaagaaaccattaccccgtggaactttgaagaagtggtggataaaggcgcgagcgcgcagagctttattgaacgcatgaccaactttgataaaaacctgccgaacgaaaaagtgctgccgaaacatagcctgctgtatgaatattttaccgtgtataacgaactgaccaaagtgaaatatgtgaccgaaggcatgcgcaaaccggcgtttctgagcggcgaacagaaaaaagcgattgtggatctgctgtttaaaaccaaccgcaaagtgaccgtgaaacagctgaaagaagattattttaaaaaaattgaatgctttgatagcgtggaaattagcggcgtggaagatcgctttaacgcgagcctgggcacctatcatgatctgctgaaaattattaaagataaagattttctggataacgaagaaaacgaagatattctggaagatattgtgctgaccctgaccctgtttgaagatcgcgaaatgattgaagaacgcctgaaaacctatgcgcatctgtttgatgataaagtgatgaaacagctgaaacgccgccgctataccggctggggccgcctgagccgcaaactgattaacggcattcgcgataaacagagcggcaaaaccattctggattttctgaaaagcgatggctttgcgaaccgcaactttatgcagctgattcatgatgatagcctgacctttaaagaagatattcagaaagcgcaggtgagcggccagggcgatagcctgcatgaacatattgcgaacctggcgggcagcccggcgattaaaaaaggcattctgcagaccgtgaaagtggtggatgaactggtgaaagtgatgggccgccataaaccggaaaacattgtgattgaaatggcgcgcgaaaaccagaccacccagaaaggccagaaaaacagccgcgaacgcatgaaacgcattgaagaaggcattaaagaactgggcagccagattctgaaagaacatccggtggaaaacacccagctgcagaacgaaaaactgtatctgtattatctgcagaacggccgcgatatgtatgtggatcaggaactggatattaaccgcctgagcgattatgatgtggatcatattgtgccgcagagctttctgaaagatgatagcattgataacaaagtgctgacccgcagcgataaaaaccgcggcaaaagcgataacgtgccgagcgaagaagtggtgaaaaaaatgaaaaactattggcgccagctgctgaacgcgaaactgattacccagcgcaaatttgataacctgaccaaagcggaacgcggcggcctgagcgaactggataaagcgggctttattaaacgccagctggtggaaacccgccagattaccaaacatgtggcgcagattctggatagccgcatgaacaccaaatatgatgaaaacgataaactgattcgcgaagtgaaagtgattaccctgaaaagcaaactggtgagcgattttcgcaaagattttcagttttataaagtgcgcgaaattaacaactatcatcatgcgcatgatgcgtatctgaacgcggtggtgggcaccgcgctgattaaaaaatatccgaaactggaaagcgaatttgtgtatggcgattataaagtgtatgatgtgcgcaaaatgattgcgaaaagcgaacaggaaattggcaaagcgaccgcgaaatattttttttatagcaacattatgaacttttttaaaaccgaaattaccctggcgaacggcgaaattcgcaaacgcccgctgattgaaaccaacggcgaaaccggcgaaattgtgtgggataaaggccgcgattttgcgaccgtgcgcaaagtgctgagcatgccgcaggtgaacattgtgaaaaaaaccgaagtgcagaccggcggctttagcaaagaaagcattctgccgaaacgcaacagcgataaactgattgcgcgcaaaaaagattgggatccgaaaaaatatggcggctttgatagcccgaccgtggcgtatagcgtgctggtggtggcgaaagtggaaaaaggcaaaagcaaaaaactgaaaagcgtgaaagaactgctgggcattaccattatggaacgcagcagctttgaaaaaaacccgattgattttctggaagcgaaaggctataaagaagtgaaaaaagatctgattattaaactgccgaaatatagcctgtttgaactggaaaacggccgcaaacgcatgctggcgagcgcgggcgaactgcagaaaggcaacgaactggcgctgccgagcaaatatgtgaactttctgtatctggcgagccattatgaaaaactgaaaggcagcccggaagataacgaacagaaacagctgtttgtggaacagcataaacattatctggatgaaattattgaacagattagcgaatttagcaaacgcgtgattctggcggatgcgaacctggataaagtgctgagcgcgtataacaaacatcgcgataaaccgattcgcgaacaggcggaaaacattattcatctgtttaccctgaccaacctgggcgcgccggcggcgtttaaatattttgataccaccattgatcgcaaacgctataccagcaccaaagaagtgctggatgcgaccctgattcatcagagcattaccggcctgtatgaaacccgcattgatctgagccagctgggcggcgat

SEQ ID NO: 20 - DNA, 4104 bp, Streptococcus pyogenes
  source 1..4104: mol_type = genomic DNA
atggataagaaatactcaataggcttagatatcggcacaaatagcgtcggatgggcggtgatcactgatgattataaggttccgtctaaaaagttcaaggttctgggaaatacagaccgccacagtatcaaaaaaaatcttataggggctcttttatttggcagtggagagacagcggaagcgactcgtctcaaacggacagctcgtagaaggtatacacgtcggaagaatcgtatttgttatctacaggagattttttcaaatgagatggcgaaagtagatgatagtttctttcatcgacttgaagagtcttttttggtggaagaagacaagaagcatgaacgtcatcctatttttggaaatatagtagatgaagttgcttatcatgagaaatatccaactatctatcatctgcgaaaaaaattggcagattctactgataaagcggatttgcgcttaatctatttggccttagcgcatatgattaagtttcgtggtcattttttgattgagggagatttaaatcctgataatagtgatgtggacaaactatttatccagttggtacaaatctacaatcaattatttgaagaaaaccctattaacgcaagtagagtagatgctaaagcgattctttctgcacgattgagtaaatcaagacgattagaaaatctcattgctcagctccccggtgagaagagaaatggcttgtttgggaatctcattgctttgtcattgggattgacccctaattttaaatcaaattttgatttggcagaagatgctaaattacagctttcaaaagatacttacgatgatgatttagataatttattggcgcaaattggagatcaatatgctgatttgtttttggcagctaagaatttatcagatgctattttactttcagatatcctaagagtaaatagtgaaataactaaggctcccctatcagcttcaatgattaagcgctacgatgaacatcatcaagacttgactcttttaaaagctttagttcgacaacaacttccagaaaagtataaagaaatcttttttgatcaatcaaaaaacggatatgcaggttatattgatgggggagctagccaagaagaattttataaatttatcaaaccaattttagaaaaaatggatggtactgaggaattattggtgaaactaaatcgtgaagatttgctgcgcaagcaacggacctttgacaacggctctattccccatcaaattcacttgggtgagctgcatgctattttgagaagacaagaagacttttatccatttttaaaagacaatcgtgagaagattgaaaaaatcttgacttttcgaattccttattatgttggtccattggcgcgtggcaatagtcgttttgcatggatgactcggaagtctgaagaaacaattaccccatggaattttgaagaagttgtcgataaaggtgcttcagctcaatcatttattgaacgcatgacaaactttgataaaaatcttccaaatgaaaaagtactaccaaaacatagtttgctttatgagtattttacggtttataacgaattgacaaaggtcaaatatgttactgagggaatgcgaaaaccagcatttctttcaggtgaacagaagaaagccattgttgatttactcttcaaaacaaatcgaaaagtaaccgttaagcaattaaaagaagattatttcaaaaaaatagaatgttttgatagtgttgaaatttcaggagttgaagatagatttaatgcttcattaggcgcctaccatgatttgctaaaaattattaaagataaagattttttggataatgaagaaaatgaagatatcttagaggatattgttttaacattgaccttatttgaagatagggggatgattgaggaaagacttaaaacatatgctcacctctttgatgataaggtgatgaaacagcttaaacgtcgccgttatactggttggggacgtttgtctcgaaaattgattaatggtattagggataagcaatctggcaaaacaatattagattttttgaaatcagatggttttgccaatcgcaattttatgcagctgatccatgatgatagtttgacatttaaagaagatattcaaaaagcacaggtgtctggacaaggccatagtttacatgaacagattgctaacttagctggcagtcctgctattaaaaaaggtattttacagactgtaaaaattgttgatgaactggtcaaagtaatggggcataagccagaaaatatcgttattgaaatggcacgtgaaaatcagacaactcaaaagggccagaaaaattcgcgagagcgtatgaaacgaatcgaagaaggtatcaaagaattaggaagtcagattcttaaagagcatcctgttgaaaatactcaattgcaaaatgaaaagctctatctctattatctacaaaatggaagagacatgtatgtggaccaagaattagatattaatcgtttaagtgattatgatgtcgatcacattgttccacaaagtttcattaaagacgattcaatagacaataaggtactaacgcgttctgataaaaatcgtggtaaatcggataacgttccaagtgaagaagtagtcaaaaagatgaaaaactattggagacaacttctaaacgccaagttaatcactcaacgtaagtttgataatttaacgaaagctgaacgtggaggtttgagtgaacttgataaagctggttttatcaaacgccaattggttgaaactcgccaaatcactaagcatgtggcacaaattttggatagtcgcatgaatactaaatacgatgaaaatgataaacttattcgagaggttaaagtgattaccttaaaatctaaattagtttctgacttccgaaaagatttccaattctataaagtacgtgagattaacaattaccatcatgcccatgatgcgtatctaaatgccgtcgttggaactgctttgattaagaaatatccaaaacttgaatcggagtttgtctatggtgattataaagtttatgatgttcgtaaaatgattgctaagtctgagcaagaaataggcaaagcaaccgcaaaatatttcttttactctaatatcatgaacttcttcaaaacagaaattacacttgcaaatggagagattcgcaaacgccctctaatcgaaactaatggggaaactggagaaattgtctgggataaagggcgagattttgccacagtgcgcaaagtattgtccatgccccaagtcaatattgtcaagaaaacagaagtacagacaggcggattctccaaggagtcaattttaccaaaaagaaattcggacaagcttattgctcgtaaaaaagactgggatccaaaaaaatatggtggttttgatagtccaacggtagcttattcagtcctagtggttgctaaggtggaaaaagggaaatcgaagaagttaaaatccgttaaagagttactagggatcacaattatggaaagaagttcctttgaaaaaaatccgattgactttttagaagctaaaggatataaggaagttaaaaaagacttaatcattaaactacctaaatatagtctttttgagttagaaaacggtcgtaaacggatgctggctagtgccggagaattacaaaaaggaaatgagctggctctgccaagcaaatatgtgaattttttatatttagctagtcattatgaaaagttgaagggtagtccagaagataacgaacaaaaacaattgtttgtggagcagcataagcattatttagatgagattattgagcaaatcagtgaattttctaagcgtgttattttagcagatgccaatttagataaagttcttagtgcatataacaaacatagagacaaaccaatacgtgaacaagcagaaaatattattcatttatttacgttgacgaatcttggagctcccgctgcttttaaatattttgatacaacaattgatcgtaaacgatatacgtctacaaaagaagttttagatgccactcttatccatcaatccatcactggtctttatgaaacacgcattgatttgagtcagctaggaggtgactga

SEQ ID NO: 21 - protein, 1367 aa, Streptococcus pyogenes
MDKKYSIGLDIGTNSVGWAVITDDYKVPSKKFKVLGNTDRHSIKKNLIGALLFGSGETAEATRLKRTARRRYTRRKNRICYLQEIFSNEMAKVDDSFFHRLEESFLVEEDKKHERHPIFGNIVDEVAYHEKYPTIYHLRKKLADSTDKADLRLIYLALAHMIKFRGHFLIEGDLNPDNSDVDKLFIQLVQIYNQLFEENPINASRVDAKAILSARLSKSRRLENLIAQLPGEKRNGLFGNLIALSLGLTPNFKSNFDLAEDAKLQLSKDTYDDDLDNLLAQIGDQYADLFLAAKNLSDAILLSDILRVNSEITKAPLSASMIKRYDEHHQDLTLLKALVRQQLPEKYKEIFFDQSKNGYAGYIDGGASQEEFYKFIKPILEKMDGTEELLVKLNREDLLRKQRTFDNGSIPHQIHLGELHAILRRQEDFYPFLKDNREKIEKILTFRIPYYVGPLARGNSRFAWMTRKSEETITPWNFEEVVDKGASAQSFIERMTNFDKNLPNEKVLPKHSLLYEYFTVYNELTKVKYVTEGMRKPAFLSGEQKKAIVDLLFKTNRKVTVKQLKEDYFKKIECFDSVEISGVEDRFNASLGAYHDLLKIIKDKDFLDNEENEDILEDIVLTLTLFEDRGMIEERLKTYAHLFDDKVMKQLKRRRYTGWGRLSRKLINGIRDKQSGKTILDFLKSDGFANRNFMQLIHDDSLTFKEDIQKAQVSGQGHSLHEQIANLAGSPAIKKGILQTVKIVDELVKVMGHKPENIVIEMARENQTTQKGQKNSRERMKRIEEGIKELGSQILKEHPVENTQLQNEKLYLYYLQNGRDMYVDQELDINRLSDYDVDHIVPQSFIKDDSIDNKVLTRSDKNRGKSDNVPSEEVVKKMKNYWRQLLNAKLITQRKFDNLTKAERGGLSELDKAGFIKRQLVETRQITKHVAQILDSRMNTKYDENDKLIREVKVITLKSKLVSDFRKDFQFYKVREINNYHHAHDAYLNAVVGTALIKKYPKLESEFVYGDYKVYDVRKMIAKSEQEIGKATAKYFFYSNIMNFFKTEITLANGEIRKRPLIETNGETGEIVWDKGRDFATVRKVLSMPQVNIVKKTEVQTGGFSKESILPKRNSDKLIARKKDWDPKKYGGFDSPTVAYSVLVVAKVEKGKSKKLKSVKELLGITIMERSSFEKNPIDFLEAKGYKEVKKDLIIKLPKYSLFELENGRKRMLASAGELQKGNELALPSKYVNFLYLASHYEKLKGSPEDNEQKQLFVEQHKHYLDEIIEQISEFSKRVILADANLDKVLSAYNKHRDKPIREQAENIIHLFTLTNLGAPAAFKYFDTTIDRKRYTSTKEVLDATLIHQSITGLYETRIDLSQLGGD

SEQ ID NO: 22 - DNA, 4212 bp, Streptococcus pyogenes
  source 1..4212: mol_type = genomic DNA
atggataaaaagtattctattggtttagacatcggcactaattccgttggatgggctgtcataaccgatgaatacaaagtaccttcaaagaaatttaaggtgttggggaacacagaccgtcattcgattaaaaagaatcttatcggtgccctcctattcgatagtggcgaaacggcagaggcgactcgcctgaaacgaaccgctcggagaaggtatacacgtcgcaagaaccgaatatgttacttacaagaaatttttagcaatgagatggccaaagttgacgattctttctttcaccgtttggaagagtccttccttgtcgaagaggacaagaaacatgaacggcaccccatctttggaaacatagtagatgaggtggcatatcatgaaaagtacccaacgatttatcacctcagaaaaaagctagttgactcaactgataaagcggacctgaggttaatctacttggctcttgcccatatgataaagttccgtgggcactttctcattgagggtgatctaaatccggacaactcggatgtcgacaaactgttcatccagttagtacaaacctataatcagttgtttgaagagaaccctataaatgcaagtggcgtggatgcgaaggctattcttagcgcccgcctctctaaatcccgacggctagaaaacctgatcgcacaattacccggagagaagaaaaatgggttgttcggtaaccttatagcgctctcactaggcctgacaccaaattttaagtcgaacttcgacttagctgaagatgccaaattgcagcttagtaaggacacgtacgatgacgatctcgacaatctactggcacaaattggagatcagtatgcggacttatttttggctgccaaaaaccttagcgatgcaatcctcctatctgacatactgagagttaatactgagattaccaaggcgccgttatccgcttcaatgatcaaaaggtacgatgaacatcaccaagacttgacacttctcaaggccctagtccgtcagcaactgcctgagaaatataaggaaatattctttgatcagtcgaaaaacgggtacgcaggttatattgacggcggagcgagtcaagaggaattctacaagtttatcaaacccatattagagaagatggatgggacggaagagttgcttgtaaaactcaatcgcgaagatctactgcgaaagcagcggactttcgacaacggtagcattccacatcaaatccacttaggcgaattgcatgctatacttagaaggcaggaggatttttatccgttcctcaaagacaatcgtgaaaagattgagaaaatcctaacctttcgcataccttactatgtgggacccctggcccgagggaactctcggttcgcatggatgacaagaaagtccgaagaaacgattactccatggaattttgaggaagttgtcgataaaggtgcgtcagctcaatcgttcatcgagaggatgaccaactttgacaagaatttaccgaacgaaaaagtattgcctaagcacagtttactttacgagtatttcacagtgtacaatgaactcacgaaagttaagtatgtcactgagggcatgcgtaaacccgcctttctaagcggagaacagaagaaagcaatagtagatctgttattcaagaccaaccgcaaagtgacagttaagcaattgaaagaggactactttaagaaaattgaatgcttcgattctgtcgagatctccggggtagaagatcgatttaatgcgtcacttggtacgtatcatgacctcctaaagataattaaagataaggacttcctggataacgaagagaatgaagatatcttagaagatatagtgttgactcttaccctctttgaagatcgggaaatgattgaggaaagactaaaaacatacgctcacctgttcgacgataaggttatgaaacagttaaagaggcgtcgctatacgggctggggacgattgtcgcggaaacttatcaacgggataagagacaagcaaagtggtaaaactattctcgattttctaaagagcgacggcttcgccaataggaactttatgcagctgatccatgatgactctttaaccttcaaagaggatatacaaaaggcacaggtttccggacaaggggactcattgcacgaacatattgcgaatcttgctggttcgccagccatcaaaaagggcatactccagacagtcaaagtagtggatgagctagttaaggtcatgggacgtcacaaaccggaaaacattgtaatcgagatggcacgcgaaaatcaaacgactcagaaggggcaaaaaaacagtcgagagcggatgaagagaatagaagagggtattaaagaactgggcagccagatcttaaaggagcatcctgtggaaaatacccaattgcagaacgagaaactttacctctattacctacaaaatggaagggacatgtatgttgatcaggaactggacataaaccgtttatctgattacgacgtcgatcacattgtaccccaatcctttttgaaggacgattcaatcgacaataaagtgcttacacgctcggataagaaccgagggaaaagtgacaatgttccaagcgaggaagtcgtaaagaaaatgaagaactattggcggcagctcctaaatgcgaaactgataacgcaaagaaagttcgataacttaactaaagctgagaggggtggcttgtctgaacttgacaaggccggatttattaaacgtcagctcgtggaaacccgccaaatcacaaagcatgttgcacagatactagattcccgaatgaatacgaaatacgacgagaacgataagctgattcgggaagtcaaagtaatcactttaaagtcaaaattggtgtcggacttcagaaaggattttcaattctataaagttagggagataaataactaccaccatgcgcacgacgcttatcttaatgccgtcgtagggaccgcactcattaagaaatacccgaagctagaaagtgagtttgtgtatggtgattacaaagtttatgacgtccgtaagatgatcgcgaaaagcgaacaggagataggcaaggctacagccaaatacttcttttattctaacattatgaatttctttaagacggaaatcactctggcaaacggagagatacgcaaacgacctttaattgaaaccaatggggagacaggtgaaatcgtatgggataagggccgggacttcgcgacggtgagaaaagttttgtccatgccccaagtcaacatagtaaagaaaactgaggtgcagaccggagggttttcaaaggaatcgattcttccaaaaaggaatagtgataagctcatcgctcgtaaaaaggactgggacccgaaaaagtacggtggcttcgatagccctacagttgcctattctgtcctagtagtggcaaaagttgagaagggaaaatccaagaaactgaagtcagtcaaagaattattggggataacgattatggagcgctcgtcttttgaaaagaaccccatcgacttccttgaggcgaaaggttacaaggaagtaaaaaaggatctcataattaaactaccaaagtatagtctgtttgagttagaaaatggccgaaaacggatgttggctagcgccggagagcttcaaaaggggaacgaactcgcactaccgtctaaatacgtgaatttcctgtatttagcgtcccattacgagaagttgaaaggttcacctgaagataacgaacagaagcaactttttgttgagcagcacaaacattatctcgacgaaatcatagagcaaatttcggaattcagtaagagagtcatcctagctgatgccaatctggacaaagtattaagcgcatacaacaagcacagggataaacccatacgtgagcaggcggaaaatattatccatttgtttactcttaccaacctcggcgctccagccgcattcaagtattttgacacaacgatagatcgcaaacgatacacttctaccaaggaggtgctagacgcgacactgattcaccaatccatcacgggattatatgaaactcggatagatttgtcacagcttgggggtgacggatcccccaagaagaagaggaaagtctcgagcgactacaaagaccatgacggtgattataaagatcatgacatcgattacaaggatgacgatgacaaggctgcagga

SEQ ID NO: 23 - protein, 1404 aa, Streptococcus pyogenes
MDKKYSIGLDIGTNSVGWAVITDEYKVPSKKFKVLGNTDRHSIKKNLIGALLFDSGETAEATRLKRTARRRYTRRKNRICYLQEIFSNEMAKVDDSFFHRLEESFLVEEDKKHERHPIFGNIVDEVAYHEKYPTIYHLRKKLVDSTDKADLRLIYLALAHMIKFRGHFLIEGDLNPDNSDVDKLFIQLVQTYNQLFEENPINASGVDAKAILSARLSKSRRLENLIAQLPGEKKNGLFGNLIALSLGLTPNFKSNFDLAEDAKLQLSKDTYDDDLDNLLAQIGDQYADLFLAAKNLSDAILLSDILRVNTEITKAPLSASMIKRYDEHHQDLTLLKALVRQQLPEKYKEIFFDQSKNGYAGYIDGGASQEEFYKFIKPILEKMDGTEELLVKLNREDLLRKQRTFDNGSIPHQIHLGELHAILRRQEDFYPFLKDNREKIEKILTFRIPYYVGPLARGNSRFAWMTRKSEETITPWNFEEVVDKGASAQSFIERMTNFDKNLPNEKVLPKHSLLYEYFTVYNELTKVKYVTEGMRKPAFLSGEQKKAIVDLLFKTNRKVTVKQLKEDYFKKIECFDSVEISGVEDRFNASLGTYHDLLKIIKDKDFLDNEENEDILEDIVLTLTLFEDREMIEERLKTYAHLFDDKVMKQLKRRRYTGWGRLSRKLINGIRDKQSGKTILDFLKSDGFANRNFMQLIHDDSLTFKEDIQKAQVSGQGDSLHEHIANLAGSPAIKKGILQTVKVVDELVKVMGRHKPENIVIEMARENQTTQKGQKNSRERMKRIEEGIKELGSQILKEHPVENTQLQNEKLYLYYLQNGRDMYVDQELDINRLSDYDVDHIVPQSFLKDDSIDNKVLTRSDKNRGKSDNVPSEEVVKKMKNYWRQLLNAKLITQRKFDNLTKAERGGLSELDKAGFIKRQLVETRQITKHVAQILDSRMNTKYDENDKLIREVKVITLKSKLVSDFRKDFQFYKVREINNYHHAHDAYLNAVVGTALIKKYPKLESEFVYGDYKVYDVRKMIAKSEQEIGKATAKYFFYSNIMNFFKTEITLANGEIRKRPLIETNGETGEIVWDKGRDFATVRKVLSMPQVNIVKKTEVQTGGFSKESILPKRNSDKLIARKKDWDPKKYGGFDSPTVAYSVLVVAKVEKGKSKKLKSVKELLGITIMERSSFEKNPIDFLEAKGYKEVKKDLIIKLPKYSLFELENGRKRMLASAGELQKGNELALPSKYVNFLYLASHYEKLKGSPEDNEQKQLFVEQHKHYLDEIIEQISEFSKRVILADANLDKVLSAYNKHRDKPIREQAENIIHLFTLTNLGAPAAFKYFDTTIDRKRYTSTKEVLDATLIHQSITGLYETRIDLSQLGGDGSPKKKRKVSSDYKDHDGDYKDHDIDYKDDDDKAAG

SEQ ID NO: 24 - DNA, 4107 bp, Streptococcus pyogenes
  source 1..4107: mol_type = genomic DNA
atggataagaaatactcaataggcttagatatcggcacaaatagcgtcggatgggcggtgatcactgatgaatataaggttccgtctaaaaagttcaaggttctgggaaatacagaccgccacagtatcaaaaaaaatcttataggggctcttttatttgacagtggagagacagcggaagcgactcgtctcaaacggacagctcgtagaaggtatacacgtcggaagaatcgtatttgttatctacaggagattttttcaaatgagatggcgaaagtagatgatagtttctttcatcgacttgaagagtcttttttggtggaagaagacaagaagcatgaacgtcatcctatttttggaaatatagtagatgaagttgcttatcatgagaaatatccaactatctatcatctgcgaaaaaaattggtagattctactgataaagcggatttgcgcttaatctatttggccttagcgcatatgattaagtttcgtggtcattttttgattgagggagatttaaatcctgataatagtgatgtggacaaactatttatccagttggtacaaacctacaatcaattatttgaagaaaaccctattaacgcaagtggagtagatgctaaagcgattctttctgcacgattgagtaaatcaagacgattagaaaatctcattgctcagctccccggtgagaagaaaaatggcttatttgggaatctcattgctttgtcattgggtttgacccctaattttaaatcaaattttgatttggcagaagatgctaaattacagctttcaaaagatacttacgatgatgatttagataatttattggcgcaaattggagatcaatatgctgatttgtttttggcagctaagaatttatcagatgctattttactttcagatatcctaagagtaaatactgaaataactaaggctcccctatcagcttcaatgattaaacgctacgatgaacatcatcaagacttgactcttttaaaagctttagttcgacaacaacttccagaaaagtataaagaaatcttttttgatcaatcaaaaaacggatatgcaggttatattgatgggggagctagccaagaagaattttataaatttatcaaaccaattttagaaaaaatggatggtactgaggaattattggtgaaactaaatcgtgaagatttgctgcgcaagcaacggacctttgacaacggctctattccccatcaaattcacttgggtgagctgcatgctattttgagaagacaagaagacttttatccatttttaaaagacaatcgtgagaagattgaaaaaatcttgacttttcgaattccttattatgttggtccattggcgcgtggcaatagtcgttttgcatggatgactcggaagtctgaagaaacaattaccccatggaattttgaagaagttgtcgataaaggtgcttcagctcaatcatttattgaacgcatgacaaactttgataaaaatcttccaaatgaaaaagtactaccaaaacatagtttgctttatgagtattttacggtttataacgaattgacaaaggtcaaatatgttactgaaggaatgcgaaaaccagcatttctttcaggtgaacagaagaaagccattgttgatttactcttcaaaacaaatcgaaaagtaaccgttaagcaattaaaagaagattatttcaaaaaaatagaatgttttgatagtgttgaaatttcaggagttgaagatagatttaatgcttcattaggtacctaccatgatttgctaaaaattattaaagataaagattttttggataatgaagaaaatgaagatatcttagaggatattgttttaacattgaccttatttgaagatagggagatgattgaggaaagacttaaaacatatgctcacctctttgatgataaggtgatgaaacagcttaaacgtcgccgttatactggttggggacgtttgtctcgaaaattgattaatggtattagggataagcaatctggcaaaacaatattagattttttgaaatcagatggttttgccaatcgcaattttatgcagctgatccatgatgatagtttgacatttaaagaagacattcaaaaagcacaagtgtctggacaaggcgatagtttacatgaacatattgcaaatttagctggtagccctgctattaaaaaaggtattttacagactgtaaaagttgttgatgaattggtcaaagtaatggggcggcataagccagaaaatatcgttattgaaatggcacgtgaaaatcagacaactcaaaagggccagaaaaattcgcgagagcgtatgaaacgaatcgaagaaggtatcaaagaattaggaagtcagattcttaaagagcatcctgttgaaaatactcaattgcaaaatgaaaagctctatctctattatctccaaaatggaagagacatgtatgtggaccaagaattagatattaatcgtttaagtgattatgatgtcgatcacattgttccacaaagtttccttaaagacgattcaatagacaataaggtcttaacgcgttctgataaaaatcgtggtaaatcggataacgttccaagtgaagaagtagtcaaaaagatgaaaaactattggagacaacttctaaacgccaagttaatcactcaacgtaagtttgataatttaacgaaagctgaacgtggaggtttgagtgaacttgataaagctggttttatcaaacgccaattggttgaaactcgccaaatcactaagcatgtggcacaaattttggatagtcgcatgaatactaaatacgatgaaaatgataaacttattcgagaggttaaagtgattaccttaaaatctaaattagtttctgacttccgaaaagatttccaattctataaagtacgtgagattaacaattaccatcatgcccatgatgcgtatctaaatgccgtcgttggaactgctttgattaagaaatatccaaaacttgaatcggagtttgtctatggtgattataaagtttatgatgttcgtaaaatgattgctaagtctgagcaagaaataggcaaagcaaccgcaaaatatttcttttactctaatatcatgaacttcttcaaaacagaaattacacttgcaaatggagagattcgcaaacgccctctaatcgaaactaatggggaaactggagaaattgtctgggataaagggcgagattttgccacagtgcgcaaagtattgtccatgccccaagtcaatattgtcaagaaaacagaagtacagacaggcggattctccaaggagtcaattttaccaaaaagaaattcggacaagcttattgctcgtaaaaaagactgggatccaaaaaaatatggtggttttgatagtccaacggtagcttattcagtcctagtggttgctaaggtggaaaaagggaaatcgaagaagttaaaatccgttaaagagttactagggatcacaattatggaaagaagttcctttgaaaaaaatccgattgactttttagaagctaaaggatataaggaagttaaaaaagacttaatcattaaactacctaaatatagtctttttgagttagaaaacggtcgtaaacggatgctggctagtgccggagaattacaaaaaggaaatgagctggctctgccaagcaaatatgtgaattttttatatttagctagtcattatgaaaagttgaagggtagtccagaagataacgaacaaaaacaattgtttgtggagcagcataagcattatttagatgagattattgagcaaatcagtgaattttctaagcgtgttattttagcagatgccaatttagataaagttcttagtgcatataacaaacatagagacaaaccaatacgtgaacaagcagaaaatattattcatttatttacgttgacgaatcttggagctcccgctgcttttaaatattttgatacaacaattgatcgtaaacgatatacgtctacaaaagaagttttagatgccactcttatccatcaatccatcactggtctttatgaaacacgcattgatttgagtcagctaggaggtgactga

SEQ ID NO: 25 - protein, 1368 aa, Streptococcus pyogenes [sequence omitted]

SEQ ID NO: 26 - protein, 1378 aa, Lactobacillus fermentum
MKEYHIGLDIGTSSIGWAVTDSQFKLMRIKGKTAIGVRLFEEGKTAAERRTFRTTRRRLKRRKWRLHYLDEIFAPHLQEVDENFLRRLKQSNIHPEDPTKNQAFIGKLLFPDLLKKNERGYPTLIKMRDELPVEQRAHYPVMNIYKLREAMINEDRQFDLREVYLAVHHIVKYRGHFLNNASVDKFKVGRIDFDKSFNVLNEAYEELQNGEGSFTIEPSKVEKIGQLLLDTKMRKLDRQKAVAKLLEVKVADKEETKRNKQIATAMSKLVLGYKADFATVAMANGNEWKIDLSSETSEDEIEKFREELSDAQNDILTEITSLFSQIMLNEIVPNGMSISESMMDRYWTHERQLAEVKEYLATQPASARKEFDQVYNKYIGQAPKERGFDLEKGLKKILSKKENWKEIDELLKAGDFLPKQRTSANGVIPHQMHQQELDRIIEKQAKYYPWLATENPATGERDRHQAKYELDQLVSFRIPYYVGPLVTPEVQKATSGAKFAWAKRKEDGEITPWNLWDKIDRAESAEAFIKRMTVKDTYLLNEDVLPANSLLYQKYNVLNELNNVRVNGRRLSVGIKQDIYTELFKKKKTVKASDVASLVMAKTRGVNKPSVEGLSDPKKFNSNLATYLDLKSIVGDKVDDNRYQTDLENIIEWRSVFEDGEIFADKLTEVEWLTDEQRSALVKKRYKGWGRLSKKLLTGIVDENGQRIIDLMWNTDQNFKEIVDQPVFKEQIDQLNQKAITNDGMTLRERVESVLDDAYTSPQNKKAIWQVVRVVEDIVKAVGNAPKSISIEFARNEGNKGEITRSRRTQLQKLFEDQAHELVKDTSLTEELEKAPDLSDRYYFYFTQGGKDMYTGDPINFDEISTKYDIDHILPQSFVKDNSLDNRVLTSRKENNKKSDQVPAKLYAAKMKPYWNQLLKQGLITQRKFENLTKDVDQNIKYRSLGFVKRQLVETRQVIKLTANILGSMYQEAGTEIIETRAGLTKQLREEFDLPKVREVNDYHHAVDAYLTTFAGQYLNRRYPKLRSFFVYGEYMKFKHGSDLKLRNFNFFHELMEGDKSQGKVVDQQTGELITTRDEVAKSFDRLLNMKYMLVSKEVHDRSDQLYGATIVTAKESGKLTSPIEIKKNRLVDLYGAYTNGTSAFMTIIKFTGNKPKYKVIGIPTTSAASLKRAGKPGSESYNQELHRIIKSNPKVKKGFEIVVPHVSYGQLIVDGDCKFTLASPTVQHPATQLVLSKKSLETISSGYKILKDKPAIANERLIRVFDEVVGQMNRYFTIFDQRSNRQKVADARDKFLSLPTESKYEGAKKVQVGKTEVITNLLMGLHANATQGDLKVLGLATFGFFQSTTGLSLSEDTMIVYQSPTGLFERRICLKDI

SEQ ID NO: 27 - protein, 1368 aa, Streptococcus pyogenes [sequence omitted]

SEQ ID NO: 28 - protein, 1053 aa, Staphylococcus aureus
MGKRNYILGLDIGITSVGYGIIDYETRDVIDAGVRLFKEANVENNEGRRSKRGARRLKRRRRHRIQRVKKLLFDYNLLTDHSELSGINPYEARVKGLSQKLSEEEFSAALLHLAKRRGVHNVNEVEEDTGNELSTKEQISRNSKALEEKYVAELQLERLKKDGEVRGSINRFKTSDYVKEAKQLLKVQKAYHQLDQSFIDTYIDLLETRRTYYEGPGEGSPFGWKDIKEWYEMLMGHCTYFPEELRSVKYAYNADLYNALNDLNNLVITRDENEKLEYYEKFQIIENVFKQKKKPTLKQIAKEILVNEEDIKGYRVTSTGKPEFTNLKVYHDIKDITARKEIIENAELLDQIAKILTIYQSSEDIQEELTNLNSELTQEEIEQISNLKGYTGTHNLSLKAINLILDELWHTNDNQIAIFNRLKLVPKKVDLSQQKEIPTTLVDDFILSPVVKRSFIQSIKVINAIIKKYGLPNDIIIELAREKNSKDAQKMINEMQKRNRQTNERIEEIIRTTGKENAKYLIEKIKLHDMQEGKCLYSLEAIPLEDLLNNPFNYEVDHIIPRSVSFDNSFNNKVLVKQEENSKKGNRTPFQYLSSSDSKISYETFKKHILNLAKGKGRISKTKKEYLLEERDINRFSVQKDFINRNLVDTRYATRGLMNLLRSYFRVNNLDVKVKSINGGFTSFLRRKWKFKKERNKGYKHHAEDALIIANADFIFKEWKKLDKAKKVMENQMFEEKQAESMPEIETEQEYKEIFITPHQIKHIKDFKDYKYSHRVDKKPNRKLINDTLYSTRKDDKGNTLIVNNLNGLYDKDNDKLKKLINKSPEKLLMYHHDPQTYQKLKLIMEQYGDEKNPLYKYYEETGNYLTKYSKKDNGPVIKKIKYYGNKLNAHLDITDDYPNSRNKVVKLSLKPYRFDVYLDNGVYKFVTVKNLDVIKKENYYEVNSKCYEEAKKLKKISNQAEFIASFYKNDLIKINGELYRVIGVNNDLLNRIEVNMIDITYREYLENMNDKRPPHIIKTIASKTQSIKKYSTDILGNLYEVKSKKHPQIIKK

SEQ ID NO: 29 - protein, 1409 aa, Streptococcus thermophilus
MLFNKCIIISINLDFSNKEKCMTKPYSIGLDIGTNSVGWAVITDNYKVPSKKMKVLGNTSKKYIKKNLLGVLLFDSGITAEGRRLKRTARRRYTRRRNRILYLQEIFSTEMATLDDAFFQRLDDSFLVPDDKRDSKYPIFGNLVEEKVYHDEFPTIYHLRKYLADSTKKADLRLVYLALAHMIKYRGHFLIEGEFNSKNNDIQKNFQDFLDTYNAIFESDLSLENSKQLEEIVKDKISKLEKKDRILKLFPGEKNSGIFSEFLKLIVGNQADFRKCFNLDEKASLHFSKESYDEDLETLLGYIGDDYSDVFLKAKKLYDAILLSGFLTVTDNETEAPLSSAMIKRYNEHKEDLALLKEYIRNISLKTYNEVFKDDTKNGYAGYIDGKTNQEDFYVYLKNLLAEFEGADYFLEKIDREDFLRKQRTFDNGSIPYQIHLQEMRAILDKQAKFYPFLAKNKERIEKILTFRIPYYVGPLARGNSDFAWSIRKRNEKITPWNFEDVIDKESSAEAFINRMTSFDLYLPEEKVLPKHSLLYETFNVYNELTKVRFIAESMRDYQFLDSKQKKDIVRLYFKDKRKVTDKDIIEYLHAIYGYDGIELKGIEKQFNSSLSTYHDLLNIINDKEFLDDSSNEAIIEEIIHTLTIFEDREMIKQRLSKFENIFDKSVLKKLSRRHYTGWGKLSAKLINGIRDEKSGNTILDYLIDDGISNRNFMQLIHDDALSFKKKIQKAQIIGDEDKGNIKEVVKSLPGSPAIKKGILQSIKIVDELVKVMGGRKPESIVVEMARENQYTNQGKSNSQQRLKRLEKSLKELGSKILKENIPAKLSKIDNNALQNDRLYLYYLQNGKDMYTGDDLDIDRLSNYDIDHIIPQAFLKDNSIDNKVLVSSASNRGKSDDFPSLEVVKKRKTFWYQLLKSKLISQRKFDNLTKAERGGLLPEDKAGFIQRQLVETRQITKHVARLLDEKFNNKKDENNRAVRTVKIITLKSTLVSQFRKDFELYKVREINDFHHAHDAYLNAVIASALLKKYPKLEPEFVYGDYPKYNSFRERKSATEKVYFYSNIMNIFKKSISLADGRVIERPLIEVNEETGESVWNKESDLATVRRVLSYPQVNVVKKVEEQNHGLDRGKPKGLFNANLSSKPKPNSNENLVGAKEYLDPKKYGGYAGISNSFAVLVKGTIEKGAKKKITNVLEFQGISILDRINYRKDKLNFLLEKGYKDIELIIELPKYSLFELSDGSRRMLASILSTNNKRGEIHKGNQIFLSQKFVKLLYHAKRISNTINENHRKYVENHKKEFEELFYYILEFNENYVGAKKNGKLLNSAFQSWQNHSIDELCSSFIGPTGSERKGLFELTSRGSAADFEFLGVKIPRYRDYTPSSLLKDATLIHQSVTGLYETRIDLAKLGEG

SEQ ID NO: 30 - protein, 1402 aa, Lactobacillus crispatus
MKIKNYNLALTPSTSAVGHVEVDDDLNILEPVHHQKAIGVAKFGEGETAEARRLARSARRTTKRRANRINHYFNEIMKPEIDKVDPLMFDRIKQAGLSPLDERKEFRTVIFDRPNIASYYHNQFPTIWHLQKYLMITDEKADIRLIYWALHSLLKHRGHFFNTTPMSQFKPGKLNLKDDMLALDDYNDLEGLSFAVANSPEIEKVIKDRSMHKKEKIAELKKLIVNDVPDKDLAKRNNKIITQIVNAIMGNSFHLNFIFDMDLDKLTSKAWSFKLDDPELDTKFDAISGSMTDNQIGIFETLQKIYSAISLLDILNGSSNVVDAKNALYDKHKRDLNLYFKFLNTLPDEIAKTLKAGYTLYIGNRKKDLLAARKLLKVNVAKNFSQDDFYKLINKELKSIDKQGLQTRFSEKVGELVAQNNFLPVQRSSDNVFIPYQLNAITFNKILENQGKYYDFLVKPNPAKKDRKNAPYELSQLMQFTIPYYVGPLVTPEEQVKSGIPKTSRFAWMVRKDNGAITPWNFYDKVDIEATADKFIKRSIAKDSYLLSELVLPKHSLLYEKYEVFNELSNVSLDGKKLSGGVKQILFNEVFKKTNKVNTSRILKALAKHNIPGSKITGLSNPEEFTSSLQTYNAWKKYFPNQIDNFAYQQDLEKMIEWSTVFEDHKILAKKLDEIEWLDDDQKKFVANTRLRGWGRLSKRLLTGLKDNYGKSIMQRLETTKANFQQIVYKPEFREQIDKISQAAAKNQSLEDILANSYTSPSNRKAIRKTMSVVDEYIKLNHGKEPDKIFLMFQRSEQEKGKQTEARSKQLNRILSQLKADKSANKLFSKQLADEFSNAIKKSKYKLNDKQYFYFQQLGRDALTGEVIDYDELYKYTVLHIIPRSKLTDDSQNNKVLTKYKIVDGSVALKFGNSYSDALGMPIKAFWTELNRLKLIPKGKLLNLTTDFSTLNKYQRDGYIARQLVETQQIVKLLATIMQSRFKHTKIIEVRNSQVANIRYQFDYFRIKNLNEYYRGFDAYLAAVVGTYLYKVYPKARRLFVYGQYLKPKKTNQENQDMHLDSEKKSQGFNFLWNLLYGKQDQIFVNGTDVIAFNRKDLITKMNTVYNYKSQKISLAIDYHNGAMFKATLFPRNDRDTAKTRKLIPKKKDYDTDIYGGYTSNVDGYMLLAEIIKRDGNKQYGFYGVPSRLVSELDTLKKTRYTEYEEKLKEIIKPELGVDLKKIKKIKILKNKVPFNQVIIDKGSKFFITSTSYRWNYRQLILSAESQQTLMDLVVDPDFSNHKARKDARKNADERLIKVYEEILYQVKNYMPMFVELHRCYEKLVDAQKTFKSLKISDKAMVLNQILILLHSNATSPVLEKLGYHTRFTLGKKHNLISENAVLVTQSITGLKENHVSIKQML

SEQ ID NO: 31 - protein, 1385 aa, unidentified
  source 1..1385: note = Thermoactinomyces candidus
MTNEKYSIGLDIGTSSIGFAVVNDNNRVIRVKGKNAIGVRLFDEGKAAADRRSFRTTRRSFRTTRRRLSRRRWRLKLLREIFDAYITPVDEAFFIRLKESNLSPKDSKKQYSGDILFNDRSDKDFYEKYPTIYHLRNALMTEHRKFDVREIYLAIHHIMKFRGHFLNATPANNFKVGRLNLEEKFEELNDIYQRVFPDESIEFRTDNLEQIKEVLLDNKRSRADRQRTLVSDIYQSSEDKDIEKRNKAVATEILKASLGNKAKLNVITNVEVDKEAAKEWSITFDSESIDDDLAKIEGQMTDDGHEIIEVLRSLYSGITLSAIVPENHTLSQSMVAKYDLHKDHLKLFKKLINGMTDTKKAKNLRAAYDGYIDGVKGKVLPQEDFYKQVQVNLDDSAEANEIQTYIDQDIFMPKQRTKANGSIPHQLQQQELDQIIENQKAYYPWLAELNPNPDKKRQQLAKYKLDELVTFRVPYYVGPMITAKDQKNQSGAEFAWMIRKEPGNITPWNFDQKVDRMATANQFIKRMTTTDTYLLGEDVLPAQSLLYQKFEVLNELNKIRIDHKPISIEQKQQIFNDLFKQFKNVTIKHLQDYLVSQGQYSKRPLIEGLADEKRFNSSLSTYSDLCGIFGAKLVEENDRQEDLEKIIEWSTIFEDKKIYRAKLNDLTWLTDDQKEKLATKRYQGWGRLSRKLLVGLKNSEHRNIMDILWITNENFMQIQAEPDFAKLVTDANKGMLEKTDSQDVINDLYTSPQNKKAIRQILLVVHDIQNAMHGQAPAKIHVEFARGEERNPRRSVQRQRQVEAAYEKVSNELVSAKVRQEFKEAINNKRDFKDRLFLYFMQGGIDIYTGKQLNIDQLSSYQIDHILPQAFVKDDSLTNRVLTNENQVKADSVPIDIFGKKMLSVWGRMKDQGLISKGKYRNLTMNPENISAHTENGFINRQLVETRQVIKLAVNILADEYGDSTQIISVKADLSHQMREDFELLKNRDVNDYHHAFDAYLAAFIGNYLLKRYPKLESYFVYGDFKKFTQKETKMRRFNFIYDLKHCDQVVNKETGEILWTKDEDIKYIRHLFAYKKILVSHEVREKRGALYNQTIYKAKDDKGSGQESKKLIRIKDDKETKIYGGYSGKSLAYMTIVQITKKNKVSYRVIGIPTLALARLNKLENDSTENNGELYKIIKPQFTHYKVDKKNGEIIETTDDFKIVVSKVRFQQLIDDAGQFFMLASDTYKNNAQQLVISNNALKAINNTNITDCPRDDLERLDNLRLDSAFDEIVKKMDKYFSAYDANNFREKIRNSNLIFYQLPVEDQWENNKITELGKRTVLTRILQGLHANATTTDMSIFKIKTPFGQLRQRSGISLSENAQLIYQSPTGLFERRVQLNKIK

SEQ ID NO: 32 - protein, 1367 aa, Fusobacterium nucleatum
MKKQKFSDYYLGFDIGTNSVGWCVTDLDYNVLRFNKKDMWGSRLFEEAKTAAERRVQRNSRRRLKRRKWRLNLLEEIFSNEILKIDSNFFRRLKESSLWLEDKSSKEKFTLFNDDNYKDYDFYKQYPTIFHLRNELIKNPEKKDIRLVYLAIHSIFKSRGHFLFEGQNLKEIKNFETLYNNLIAFLEDNGINKIIDKNNIEKLEKIVCDSKKGLKDKEKEFKEIFNSDKQLVAIFKLSVGSSVSLNDLFDTDEYKKGEVEKEKISFREQIYEDDKPIYYSILGEKIELLDIAKTFYDFMVLNNILADSQYISEAKVKLYEEHKKDLKNLKYIIRKYNKGNYDKLFKDKNENNYSAYIGLNKEKSKKEVIEKSRLKIDDLIKNIKGYLPKVEEIEEKDKAIFNKILNKIELKTILPKQRISDNGTLPYQIHEAELEKILENQSKYYDFLNYEENGIITKDKLLMTFKFRIPYYVGPLNSYHKDKGGNSWIVRKEEGKILPWNFEQKVDIEKSAEEFIKRMTNKCTYLNGEDVIPKDTFLYSEYVILNELNKVQVNDEFLNEENKRKIIDELFKENKKVSEKKFKEYLLVKQIVDGTIELKGVKDSFNSNYISYIRFKDIFGEKLNLDIYKEISEKSILWKCLYGDDKKIFEKKIKNEYGDILTKDEIKKINTFKFNNWGRLSEKLLTGIEFINLETGECYSSVMDALRRTNYNLMELLSSKFTLQESINNENKEMNEASYRDLIEESYVSPSLKRAIFQTLKIYEEIRKITGRVPKKVFIEMARGGDESMKNKKIPARQEQLKKLYDSCGNDIANFSIDIKEMKNSLISYDNNSLRQKKLYLYYLQFGKCMYTGREIDLDRLLQNNDTYDIDHIYPRSKVIKDDSFDNLVLVLKNENAEKSNEYPVKKEIQEKMKSFWRFLKEKNFISDEKYKRLTGKDDFELRGFMARQLVNVRQTTKEVGKILQQIEPEIKIVYSKAEIASSFREMFDFIKVRELNDTHHAKDAYLNIVAGNVYNTKFTEKPYRYLQEIKENYDVKKIYNYDIKNAWDKENSLEIVKKNMEKNTVNITRFIKEKKGQLFDLNPIKKGETSNEIISIKPKVYNGKDDKLNEKYGYYKSLNPAYFLYVEHKEKNKRIKSFERVNLVDVNNIKDEKSLVKYLIENKKLVEPRVIKKVYKRQVILINDYPYSIVTLDSNKLMDFENLKPLFLENKYEKILKNVIKFLEDNQGKSEENYKFIYLKKKDRYEKNETLESVKDRYNLEFNEMYDKFLEKLDSKDYKNYMNNKKYQELLDVKEKFIKLNLFDKAFTLKSFLDLFNRKTMADFSKVGLTKYLGKIQKISSNVLSKNELYLLEESVTGLFVKKIKL

SEQ ID NO: 33 - protein, 1286 aa, Enterococcus cecorum
RRKQRIQILQELLGEEVLKTDPGFFHRMKESRYVVEDKRTLDGKQVELPYALFVDKDYTDKEYYKQFPTINHLIVYLMTTSDTPDIRLVYLALHYYMKNRGNFLHSGDINNVKDINDILEQLDNVLETFLDGWNLKLKSYVEDIKNIYNRDLGRGERKKAFVNTLGAKTKAEKAFCSLISGGSTNLAELFDDSSLKEIETPKIEFASSSLEDKIDGIQEALEDRFAVIEAAKRLYDWKTLTDILGDSSSLAEARVNSYQMHHEQLLELKSLVKEYLDRKVFQEVFVSLNVANNYPAYIGHTKINGKKKELEVKRTKRNDFYSYVKKQVIEPIKKKVSDEAVLTKLSEIESLIEVDKYLPLQVNSDNGVIPYQVKLNELTRIFDNLENRIPVLRENRDKIIKTFKFRIPYYVGSLNGVVKNGKCTNWMVRKEEGKIYPWNFEDKVDLEASAEQFIRRMTNKCTYLVNEDVLPKYSLLYSKYLVLSELNNLRIDGRPLDVKIKQDIYENVFKKNRKVTLKKIKKYLLKEGIITDDDELSGLADDVKSSLTAYRDFKEKLGHLDLSEAQMENIILNITLFGDDKKLLKKRLAALYPFIDDKSLNRIATLNYRDWGRLSERFLSGITSVDQETGELRTIIQCMYETQANLMQLLAEPYHFVEAIEKENPKVDLESISYRIVNDLYVSPAVKRQIWQTLLVIKDIKQVMKHDPERIFIEMAREKQESKKTKSRKQVLSEVYKKAKEYEHLFEKLNSLTEEQLRSKKIYLYFTQLGKCMYSGEPIDFENLVSANSNYDIDHIYPQSKTIDDSFNNIVLVKKSLNAYKSNHYPIDKNIRDNEKVKTLWNTLVSKGLITKEKYERLIRSTPFSDEELAGFIARQLVETRQSTKAVAEILSNWFPESEIVYSKAKNVSNFRQDFEILKVRELNDCHHAHDAYLNIVVGNAYHTKFTNSPYRFIKNKANQEYNLRKLLQKVNKIESNGVVAWVGQSENNPGTIATVKKVIRRNTVLISRMVKEVDGQLFDLTLMKKGKGQVPIKSSDERLTDISKYGGYNKATGAYFTFVKSKKRGKVVRSFEYVPLHLSKQFENNNELLKEYIEKDRGLTDVEILIPKVLINSLFRYNGSLVRITGRGDTRLLLVHEQPLYVSNSFVQQLKSVSSYKLKKSENDNAKLTKTATEKLSNIDELYDGLLRKLDLPIYSYWFSSIKEYLVESRTKYIKLSIEEKALVIFEILHLFQSDAQVPNLKILGLSTKPSRIRIQKNLKDTDKMSIIHQSPSGIFEHEIELTSL

SEQ ID NO: 34 - protein, 1312 aa, unidentified
  source 1..1312: note = Anaerostipes hadrus
MQNGFLGITVSSEQVGWAVTNPKYELERASRKDLWGVRLFDKAETAEDRRMFRTNRRLNQRKKNRIHYLRDIFHEEVNQKDPNFFQQLDESNFCEDDRTVEFNFDTNLYKNQFPTVYHLRKYLMETKDKPDIRLVYLAFSKFMKNRGHFLYKGNLGEVMDFENSMKGFCESLEKFNIDFPTLSDEQVKEVRDILCDHKIAKTVKKKNIITITKVKSKTAKAWIGLFCGCSVPVKVLFQDIDEEIVTDPEKISFEDASYDDYIANIEKGVGIYYEAIVSAKMLFDWSILNEILGDHQLLSDAMIAEYNKHHDDLKRLQKIIKGTGSRELYQDIFINDVSGNYVCYVGHAKTMSSADQKQFYTFLKNRLKNVNGISSEDAEWIDTEIKNGTLLPKQTKRDNSVIPHQLQLREFELILDNMQEMYPFLKENREKLLKIFNFVIPYYVGPLKGVVRKGESTNWMVPKKDGVIHPWNFDEMVDKEASAECFISRMTGNCSYLFNEKVLPKNSLLYETFEVLNELNPLKINGEPISVELKQRIYEQLFLTGKKVTKKSLTKYLIKNGYDKDIELSGIDNEFHSNLKSHIDFEDYDNLSDEEVEQIILRITVFEDKQLLKDYLNREFVKLSEDERKQICSLSYKGWGNLSEMLLNGITVTDSNGVEVSVMDMLWNTNLNLMQILSKKYGYKAEIEHYNKEHEKTIYNREDLMDYLNIPPAQRRKVNQLITIVKSLKKTYGVPNKIFFKISREHQDDPKRTSSRKEQLKYLYKSLKSEDEKHLMKELDELNDHELSNDKVYLYFLQKGRCIYSGKKLNLSRLRKSNYQNDIDYIYPLSAVNDRSMNNKVLTGIQENRADKYTYFPVDSEIQKKMKGFWMELVLQGFMTKEKYFRLSRENDFSKSELVSFIEREISDNQQSGRMIASVLQYYFPESKIVFVKEKLISSFKRDFHLISSYGHNHLQAAKDAYITIVVGNVYHTKFTMDPAIYFKNHKRKDYDLNRLFLENISRDGQIAWESGPYGSIQTVRKEYAQNHIAVTKRVVEVKGGLFKQMPLKKGHGEYPLKTNDPRFGNIAQYGGYTNVTGSYFVLVESMEKGKKRISLEYVPVYLHERLEDDPGHKLLKEYLVDHRKLNHPKILLAKVRKNSLLKIDGFYYRLNGRSGNALILTNAVELIMDDWQTKTANKISGYMKRRAIDKKARVYQNEFHIQELEQLYDFYLDKLKNGVYKNRKNNQAELIHNEKEQFMELKTEDQCVLLTEIKKLFVCSPMQADLTLIGGSKHTGMIAMSSNVTKADFAVIAEDPLGLRNKVIYSHKGEK

SEQ ID NO: 35 - protein, 1344 aa, Kandleria vitulina
MSQNNNKIYNIGLDIGDASVGWAVVDEHYNLLKRHGKHMWGSRLFTQANTAVERRSSRSTRRRYNKRRERIRLLREIMEDMVLDVDPTFFIRLANVSFLDQEDKKDYLKENYHSNYNLFIDKDFNDKTYYDKYPTIYHLRKHLCESKEKEDPRLIYLALHHIVKYRGNFLYEGQKFSMDVSNIEDKMIDVLRQFNEINLFEYVEDRKKIDEVLNVLKEPLSKKHKAEKAFALFDTTKDNKAAYKELCAALAGNKFNVTKMLKEAELHDEDEKDISFKFSDATFDDAFVEKQPLLGDCVEFIDLLHDIYSWVELQNILGSAHTSEPSISAAMIQRYEDHKNDLKLLKDVIRKYLPKKYFEVFRDEKSKKNNYCNYINHPSKTPVDEFYKYIKKLIEKIDDPDVKTILNKIELESFMLKQNSRTNGAVPYQMQLDELNKILENQSVYYSDLKDNEDKIRSILTFRIPYYFGPLNITKDRQFDWIIKKEGKENERILPWNANEIVDVDKTADEFIKRMRNFCTYFPDEPVMAKNSLTVSKYEVLNEINKLRINDHLIKRDMKDKMLHTLFMDHKSISANAMKKWLVKNQYFSNTDDIKIEGFQKENACSTSLTPWIDFTKIFGKINESNYDFIEKIIYDVTVFEDKKILRRRLKKEYDLDEEKIKKILKLKYSGWSRLSKKLLSGIKTKYKDSTRTPETVLEVMERTNMNLMQVINDEKLGFKKTIDDANSTSVSGKFSYAEVQELAGSPAIKRGIWQALLIVDEIKKIMKHEPAHVYIEFARNEDEKERKDSFVNQMLKLYKDYDFEDETEKEANKHLKGEDAKSKIRSERLKLYYTQMGKCMYTGKSLDIDRLDTYQVDHIVPQSLLKDDSIDNKVLVLSSENQRKLDDLVIPSSIRNKMYGFWEKLFNNKIISPKKFYSLIKTEFNEKDQERFINRQIVETRQITKHVAQIIDNHYENTKVVTVRADLSHQFRERYHIYKNRDINDFHHAHDAYIATILGTYIGHRFESLDAKYIYGEYKRIFRNQKNKGKEMKKNNDGFILNSMRNIYADKDTGEIVWDPNYIDRIKKCFYYKDCFVTKKLEENNGTFFNVTVLPNDTNSDKDNTLATVPVNKYRSNVNKYGGFSGVNSFIVAIKGKKKKGKKVIEVNKLTGIPLMYKNADEEIKINYLKQAEDLEEVQIGKEILKNQLIEKDGGLYYIVAPTEIINAKQLILNESQTKLVCEIYKAMKYKNYDNLDSEKIIDLYRLLINKMELYYPEYRKQLVKKFEDRYEQLKVISIEEKCNIIKQILATLHCNSSIGKIMYSDFKISTTIGRLNGRTISLDDISFIAESPTGMYSKKYKL

SEQ ID NO: 36 - protein, 1288 aa, Enterococcus faecalis
MRLFEEGHTAEDRRLKRTARRRISRRRNRLRYLQAFFEEAMTDLDENFFARLQESFLVPEDKKWHRHPIFAKLEDEVAYHETYPTIYHLRKKLADSSEQADLRLIYLALAHIVKYRGHFLIEGKLSTENTSVKDQFQQFMVIYNQTFVNGESRLVSAPLPESVLIEEELTEKASRTKKSEKVLQQFPQEKANGLFGQFLKLMVGNKADFKKVFGLEEEAKITYASESYEEDLEGILAKVGDEYSDVFLAAKNVYDAVELSTILADSDKKSHAKLSSSMIVRFTEHQEDLKKFKRFIRENCPDEYDNLFKNEQKDGYAGYIAHAGKVSQLKFYQYVKKIIQDIAGAEYFLEKIAQENFLRKQRTFDNGVIPHQIHLAELQAIIHRQAAYYPFLKENQEKIEQLVTFRIPYYVGPLSKGDASTFAWLKRQSEEPIRPWNLQETVDLDQSATAFIERMTNFDTYLPSEKVLPKHSLLYEKFMVFNELTKISYTDDRGIKANFSGKEKEKIFDYLFKTRRKVKKKDIIQFYRNEYNTEIVTLSGLEEDQFNASFSTYQDLLKCGLTRAELDHPDNAEKLEDIIKILTIFEDRQRIRTQLSTFKGQFSAEVLKKLERKHYTGWGRLSKKLINGIYDKESGKTILDYLVKDDGVSKHYNRNFMQLINDSQLSFKNAIQKAQSSEHEETLSETVNELAGSPAIKKGIYQSLKIVDELVAIMGYAPKRIVVEMARENQTTSTGKRRSIQRLKIVEKAMAEIGSNLLKEQPTTNEQLRDTRLFLYYMQNGKDMYTGDELSLHRLSHYDIDHIIPQSFMKDDSLDNLVLVGSTENRGKSDDVPSKEVVKDMKAYWEKLYAAGLISQRKFQRLTKGEQGGLTLEDKAHFIQRQLVETRQITKNVAGILDQRYNAKSKEKKVQIITLKASLTSQFRSIFGLYKVREVNDYHHGQDAYLNCVVATTLLKVYPNLAPEFVYGEYPKFQTFKENKATAKAIIYTNLLRFFTEDEPRFTKDGEILWSNSYLKTIKKELNYHQMNIVKKVEVQKGGFSKESIKPKGPSNKLIPVKNGLDPQKYGGFDSPVVAYTVLFTHEKGKKPLIKQEILGITIMEKTRFEQNPILFLEEKGFLRPRVLMKLPKYTLYEFPEGRRRLLASAKEAQKGNQMVLPEHLLTLLYHAKQCLLPNQSESLAYVEQHQPEFQEILERVVDFAEVHTLAKSKVQQIVKLFEANQTADVKEIAASFIQLMQFNAMGAPSTFKFFQKDIERARYTSIKEIFDATIIYQSPTGLYETRRKVVD

SEQ ID NO: 37 - protein, 1052 aa, Staphylococcus aureus
KRNYILGLDIGITSVGYGIIDYETRDVIDAGVRLFKEANVENNEGRRSKRGARRLKRRRRHRIQRVKKLLFDYNLLTDHSELSGINPYEARVKGLSQKLSEEEFSAALLHLAKRRGVHNVNEVEEDTGNELSTKEQISRNSKALEEKYVAELQLERLKKDGEVRGSINRFKTSDYVKEAKQLLKVQKAYHQLDQSFIDTYIDLLETRRTYYEGPGEGSPFGWKDIKEWYEMLMGHCTYFPEELRSVKYAYNADLYNALNDLNNLVITRDENEKLEYYEKFQIIENVFKQKKKPTLKQIAKEILVNEEDIKGYRVTSTGKPEFTNLKVYHDIKDITARKEIIENAELLDQIAKILTIYQSSEDIQEELTNLNSELTQEEIEQISNLKGYTGTHNLSLKAINLILDELWHTNDNQIAIFNRLKLVPKKVDLSQQKEIPTTLVDDFILSPVVKRSFIQSIKVINAIIKKYGLPNDIIIELAREKNSKDAQKMINEMQKRNRQTNERIEEIIRTTGKENAKYLIEKIKLHDMQEGKCLYSLEAIPLEDLLNNPFNYEVDHIIPRSVSFDNSFNNKVLVKQEENSKKGNRTPFQYLSSSDSKISYETFKKHILNLAKGKGRISKTKKEYLLEERDINRFSVQKDFINRNLVDTRYATRGLMNLLRSYFRVNNLDVKVKSINGGFTSFLRRKWKFKKERNKGYKHHAEDALIIANADFIFKEWKKLDKAKKVMENQMFEEKQAESMPEIETEQEYKEIFITPHQIKHIKDFKDYKYSHRVDKKPNRELINDTLYSTRKDDKGNTLIVNNLNGLYDKDNDKLKKLINKSPEKLLMYHHDPQTYQKLKLIMEQYGDEKNPLYKYYEETGNYLTKYSKKDNGPVIKKIKYYGNKLNAHLDITDDYPNSRNKVVKLSLKPYRFDVYLDNGVYKFVTVKNLDVIKKENYYEVNSKCYEEAKKLKKISNQAEFIASFYNNDLIKINGELYRVIGVNNDLLNRIEVNMIDITYREYLENMNDKRPPRIIKTIASKTQSIKKYSTDILGNLYEVKSKKHPQIIKKG

SEQ ID NO: 38 - protein, 1082 aa, Geobacillus thermodenitrificans
MKYKIGLDIGITSIGWAVINLDIPRIEDLGVRIFDRAENPKTGESLALPRRLARSARRRLRRRKHRLERIRRLFVREGILTKEELNKLFEKKHEIDVWQLRVEALDRKLNNDELARILLHLAKRRGFRSNRKSERTNKENSTMLKHIEENQSILSSYRTVAEMVVKDPKFSLHKRNKEDNYTNTVARDDLEREIKLIFAKQREYGNIVCTEAFEHEYISIWASQRPFASKDDIEKKVGFCTFEPKEKRAPKATYTFQSFTVWEHINKLRLVSPGGIRALTDDERRLIYKQAFHKNKITFHDVRTLLNLPDDTRFKGLLYDRNTTLKENEKVRFLELGAYHKIRKAIDSVYGKGAAKSFRPIDFDTFGYALTMFKDDTDIRSYLRNEYEQNGKRMENLADKVYDEELIEELLNLSFSKFGHLSLKALRNILPYMEQGEVYSTACERAGYTFTGPKKKQKTVLLPNIPPIANPVVMRALTQARKVVNAIIKKYGSPVSIHIELARELSQSFDERRKMQKEQEGNRKKNETAIRQLVEYGLTLNPTGLDIVKFKLWSEQNGKCAYSLQPIEIERLLEPGYTEVDHVIPYSRSLDDSYTNKVLVLTKENREKGNRTPAEYLGLGSERWQQFETFVLTNKQFSKKKRDRLLRLHYDENEENEFKNRNLNDTRYISRFLANFIREHLKFADSDDKQKVYTVNGRITAHLRSRWNFNKNREESNLHHAVDAAIVACTTPSDIARVTAFYQRREQNKELSKKTDPQFPQPWPHFADELQARLSKNPKESIKALNLGNYDNEKLESLQPVFVSRMPKRSITGAAHQETLRRYIGIDERSGKIQTVVKKKLSEIQLDKTGHFPMYGKESDPRTYEAIRQRLLEHNNDPKKAFQEPLYKPKKNGELGPIIRTIKIIDTTNQVIPLNDGKTVAYNSNIVRVDVFEKDGKYYCVPIYTIDMMKGILPNKAIEPNKPYSEWKEMTEDYTFRFSLYPNDLIRIEFPREKTIKTAVGEEIKIKDLFAYYQTIDSSNGGLSLVSHDNNFSLRSIGSRTLKRFEKYQVDVLGNIYKVRGEKRVGVASSSHSKAGETIRPL

SEQ ID NO: 39 - protein, 1375 aa, Streptococcus canis
MEKKYSIGLDIGTNSVGWAVITDDYKVPSKKFKVLGNTNRKSIKKNLMGALLFDSGETAEATRLKRTARRRYTRRKNRIRYLQEIFANEMAKLDDSFFQRLEESFLVEEDKKNERHPIFGNLADEVAYHRNYPTIYHLRKKLADSPEKADLRLIYLALAHIIKFRGHFLIEGKLNAENSDVAKLFYQLIQTYNQLFEESPLDEIEVDAKGILSARLSKSKRLEKLIAVFPNEKKNGLFGNIIALALGLTPNFKSNFDLTEDAKLQLSKDTYDDDLDELLGQIGDQYADLFSAAKNLSDAILLSDILRSNSEVTKAPLSASMVKRYDEHHQDLALLKTLVRQQFPEKYAEIFKDDTKNGYAGYVGIGIKHRKRTTKLATQEEFYKFIKPILEKMDGAEELLAKLNRDDLLRKQRTFDNGSIPHQIHLKELHAILRRQEEFYPFLKENREKIEKILTFRIPYYVGPLARGNSRFAWLTRKSEEAITPWNFEEVVDKGASAQSFIERMTNFDEQLPNKKVLPKHSLLYEYFTVYNELTKVKYVTERMRKPEFLSGEQKKAIVDLLFKTNRKVTVKQLKEDYFKKIECFDSVEIIGVEDRFNASLGTYHDLLKIIKDKDFLDNEENEDILEDIVLTLTLFEDREMIEERLKTYAHLFDDKVMKQLKRRHYTGWGRLSRKMINGIRDKQSGKTILDFLKSDGFSNRNFMQLIHDDSLTFKEEIEKAQVSGQGDSLHEQIADLAGSPAIKKGILQTVKIVDELVKVMGHKPENIVIEMARENQTTTKGLQQSRERKKRIEEGIKELESQILKENPVENTQLQNEKLYLYYLQNGRDMYVDQELDINRLSDYDVDHIVPQSFIKDDSIDNKVLTRSVENRGKSDNVPSEEVVKKMKNYWRQLLNAKLITQRKFDNLTKAERGGLSEADKAGFIKRQLVETRQITKHVARILDSRMNTKRDKNDKPIREVKVITLKSKLVSDFRKDFQLYKVRDINNYHHAHDAYLNAVVGTALIKKYPKLESEFVYGDYKVYDVRKMIAKSEQEIGKATAKRFFYSNIMNFFKTEVKLANGEIRKRPLIETNGETGEVVWNKEKDFATVRKVLAMPQVNIVKKTEVQTGGFSKESILSKRESAKLIPRKKGWDTRKYGGFGSPTVAYSILVVAKVEKGKAKKLKSVKVLVGITIMEKGSYEKDPIGFLEAKGYKDIKKELIFKLPKYSLFELENGRRRMLASATELQKANELVLPQHLVRLLYYTQNISATTGSNNLGYIEQHREEFKEIFEKIIDFSEKYILKNKVNSNLKSSFDEQFAVSDSILLSNSFVSLLKYTSFGASGGFTFLDLDVKQGRLRYQTVTEVLDATLIYQSITGLYETRTDLSQLGGD

SEQ ID NO: 40 - protein, 1368 aa, Streptococcus pyogenes
MDKKYSIGLXIGTNSVGWAVITDEYKVPSKKFKVLGNTDRHSIKKNLIGALLFDSGETAEATRLKRTARRRYTRRKNRICYLQEIFSNEMAKVDDSFFHRLEESFLVEEDKKHERHPIFGNIVDEVAYHEKYPTIYHLRKKLVDSTDKADLRLIYLALAHMIKFRGHFLIEGDLNPDNSDVDKLFIQLVQTYNQLFEENPINASGVDAKAILSARLSKSRRLENLIAQLPGEKKNGLFGNLIALSLGLTPNFKSNFDLAEDAKLQLSKDTYDDDLDNLLAQIGDQYADLFLAAKNLSDAILLSDILRVNTEITKAPLSASMIKRYDEHHQDLTLLKALVRQQLPEKYKEIFFDQSKNGYAGYIDGGASQEEFYKFIKPILEKMDGTEELLVKLNREDLLRKQRTFDNGSIPHQIHLGELHAILRRQEDFYPFLKDNREKIEKILTFRIPYYVGPLARGNSRFAWMTRKSEETITPWNFEEVVDKGASAQSFIERMTNFDKNLPNEKVLPKHSLLYEYFTVYNELTKVKYVTEGMRKPAFLSGEQKKAIVDLLFKTNRKVTVKQLKEDYFKKIECFDSVEISGVEDRFNASLGTYHDLLKIIKDKDFLDNEENEDILEDIVLTLTLFEDREMIEERLKTYAHLFDDKVMKQLKRRRYTGWGRLSRKLINGIRDKQSGKTILDFLKSDGFANRNFMQLIHDDSLTFKEDIQKAQVSGQGDSLHEHIANLAGSPAIKKGILQTVKVVDELVKVMGRHKPENIVIEMARENQTTQKGQKNSRERMKRIEEGIKELGSQILKEHPVENTQLQNEKLYLYYLQNGRDMYVDQELDINRLSDYDVDXIVPQSFLKDDSIDNKVLTRSDKNRGKSDNVPSEEVVKKMKNYWRQLLNAKLITQRKFDNLTKAERGGLSELDKAGFIKRQLVETRQITKHVAQILDSRMNTKYDENDKLIREVKVITLKSKLVSDFRKDFQFYKVREINNYHHAHDAYLNAVVGTALIKKYPKLESEFVYGDYKVYDVRKMIAKSEQEIGKATAKYFFYSNIMNFFKTEITLANGEIRKRPLIETNGETGEIVWDKGRDFATVRKVLSMPQVNIVKKTEVQTGGFSKESILPKRNSDKLIARKKDWDPKKYGGFDSPTVAYSVLVVAKVEKGKSKKLKSVKELLGITIMERSSFEKNPIDFLEAKGYKEVKKDLIIKLPKYSLFELENGRKRMLASAGELQKGNELALPSKYVNFLYLASHYEKLKGSPEDNEQKQLFVEQHKHYLDEIIEQISEFSKRVILADANLDKVLSAYNKHRDKPIREQAENIIHLFTLTNLGAPAAFKYFDTTIDRKRYTSTKEVLDATLIHQSITGLYETRIDLSQLGGD

SEQ ID NO: 41 - protein, 1368 aa, Streptococcus pyogenes
MDKKYSIGLAIGTNSVGWAVITDEYKVPSKKFKVLGNTDRHSIKKNLIGALLFDSGETAEATRLKRTARRRYTRRKNRICYLQEIFSNEMAKVDDSFFHRLEESFLVEEDKKHERHPIFGNIVDEVAYHEKYPTIYHLRKKLVDSTDKADLRLIYLALAHMIKFRGHFLIEGDLNPDNSDVDKLFIQLVQTYNQLFEENPINASGVDAKAILSARLSKSRRLENLIAQLPGEKKNGLFGNLIALSLGLTPNFKSNFDLAEDAKLQLSKDTYDDDLDNLLAQIGDQYADLFLAAKNLSDAILLSDILRVNTEITKAPLSASMIKRYDEHHQDLTLLKALVRQQLPEKYKEIFFDQSKNGYAGYIDGGASQEEFYKFIKPILEKMDGTEELLVKLNREDLLRKQRTFDNGSIPHQIHLGELHAILRRQEDFYPFLKDNREKIEKILTFRIPYYVGPLARGNSRFAWMTRKSEETITPWNFEEVVDKGASAQSFIERMTNFDKNLPNEKVLPKHSLLYEYFTVYNELTKVKYVTEGMRKPAFLSGEQKKAIVDLLFKTNRKVTVKQLKEDYFKKIECFDSVEISGVEDRFNASLGTYHDLLKIIKDKDFLDNEENEDILEDIVLTLTLFEDREMIEERLKTYAHLFDDKVMKQLKRRRYTGWGRLSRKLINGIRDKQSGKTILDFLKSDGFANRNFMQLIHDDSLTFKEDIQKAQVSGQGDSLHEHIANLAGSPAIKKGILQTVKVVDELVKVMGRHKPENIVIEMARENQTTQKGQKNSRERMKRIEEGIKELGSQILKEHPVENTQLQNEKLYLYYLQNGRDMYVDQELDINRLSDYDVDAIVPQSFLKDDSIDNKVLTRSDKNRGKSDNVPSEEVVKKMKNYWRQLLNAKLITQRKFDNLTKAERGGLSELDKAGFIKRQLVETRQITKHVAQILDSRMNTKYDENDKLIREVKVITLKSKLVSDFRKDFQFYKVREINNYHHAHDAYLNAVVGTALIKKYPKLESEFVYGDYKVYDVRKMIAKSEQEIGKATAKYFFYSNIMNFFKTEITLANGEIRKRPLIETNGETGEIVWDKGRDFATVRKVLSMPQVNIVKKTEVQTGGFSKESILPKRNSDKLIARKKDWDPKKYGGFDSPTVAYSVLVVAKVEKGKSKKLKSVKELLGITIMERSSFEKNPIDFLEAKGYKEVKKDLIIKLPKYSLFELENGRKRMLASAGELQKGNELALPSKYVNFLYLASHYEKLKGSPEDNEQKQLFVEQHKHYLDEIIEQISEFSKRVILADANLDKVLSAYNKHRDKPIREQAENIIHLFTLTNLGAPAAFKYFDTTIDRKRYTSTKEVLDATLIHQSITGLYETRIDLSQLGGD

SEQ ID NO: 42 - protein, 1368 aa, Streptococcus pyogenes
MDKKYSIGLXIGTNSVGWAVITDEYKVPSKKFKVLGNTDRHSIKKNLIGALLFDSGETAEATRLKRTARRRYTRRKNRICYLQEIFSNEMAKVDDSFFHRLEESFLVEEDKKHERHPIFGNIVDEVAYHEKYPTIYHLRKKLVDSTDKADLRLIYLALAHMIKFRGHFLIEGDLNPDNSDVDKLFIQLVQTYNQLFEENPINASGVDAKAILSARLSKSRRLENLIAQLPGEKKNGLFGNLIALSLGLTPNFKSNFDLAEDAKLQLSKDTYDDDLDNLLAQIGDQYADLFLAAKNLSDAILLSDILRVNTEITKAPLSASMIKRYDEHHQDLTLLKALVRQQLPEKYKEIFFDQSKNGYAGYIDGGASQEEFYKFIKPILEKMDGTEELLVKLNREDLLRKQRTFDNGSIPHQIHLGELHAILRRQEDFYPFLKDNREKIEKILTFRIPYYVGPLARGNSRFAWMTRKSEETITPWNFEEVVDKGASAQSFIERMTNFDKNLPNEKVLPKHSLLYEYFTVYNELTKVKYVTEGMRKPAFLSGEQKKAIVDLLFKTNRKVTVKQLKEDYFKKIECFDSVEISGVEDRFNASLGTYHDLLKIIKDKDFLDNEENEDILEDIVLTLTLFEDREMIEERLKTYAHLFDDKVMKQLKRRRYTGWGRLSRKLINGIRDKQSGKTILDFLKSDGFANRNFMQLIHDDSLTFKEDIQKAQVSGQGDSLHEHIANLAGSPAIKKGILQTVKVVDELVKVMGRHKPENIVIEMARENQTTQKGQKNSRERMKRIEEGIKELGSQILKEHPVENTQLQNEKLYLYYLQNGRDMYVDQELDINRLSDYDVDHIVPQSFLKDDSIDNKVLTRSDKNRGKSDNVPSEEVVKKMKNYWRQLLNAKLITQRKFDNLTKAERGGLSELDKAGFIKRQLVETRQITKHVAQILDSRMNTKYDENDKLIREVKVITLKSKLVSDFRKDFQFYKVREINNYHHAHDAYLNAVVGTALIKKYPKLESEFVYGDYKVYDVRKMIAKSEQEIGKATAKYFFYSNIMNFFKTEITLANGEIRKRPLIETNGETGEIVWDKGRDFATVRKVLSMPQVNIVKKTEVQTGGFSKESILPKRNSDKLIARKKDWDPKKYGGFDSPTVAYSVLVVAKVEKGKSKKLKSVKELLGITIMERSSFEKNPIDFLEAKGYKEVKKDLIIKLPKYSLFELENGRKRMLASAGELQKGNELALPSKYVNFLYLASHYEKLKGSPEDNEQKQLFVEQHKHYLDEIIEQISEFSKRVILADANLDKVLSAYNKHRDKPIREQAENIIHLFTLTNLGAPAAFKYFDTTIDRKRYTSTKEVLDATLIHQSITGLYETRIDLSQLGGD

SEQ ID NO: 43 - protein, 1368 aa, Streptococcus pyogenes
MDKKYSIGLDIGTNSVGWAVITDEYKVPSKKFKVLGNTDRHSIKKNLIGALLFDSGETAEATRLKRTARRRYTRRKNRICYLQEIFSNEMAKVDDSFFHRLEESFLVEEDKKHERHPIFGNIVDEVAYHEKYPTIYHLRKKLVDSTDKADLRLIYLALAHMIKFRGHFLIEGDLNPDNSDVDKLFIQLVQTYNQLFEENPINASGVDAKAILSARLSKSRRLENLIAQLPGEKKNGLFGNLIALSLGLTPNFKSNFDLAEDAKLQLSKDTYDDDLDNLLAQIGDQYADLFLAAKNLSDAILLSDILRVNTEITKAPLSASMIKRYDEHHQDLTLLKALVRQQLPEKYKEIFFDQSKNGYAGYIDGGASQEEFYKFIKPILEKMDGTEELLVKLNREDLLRKQRTFDNGSIPHQIHLGELHAILRRQEDFYPFLKDNREKIEKILTFRIPYYVGPLARGNSRFAWMTRKSEETITPWNFEEVVDKGASAQSFIERMTNFDKNLPNEKVLPKHSLLYEYFTVYNELTKVKYVTEGMRKPAFLSGEQKKAIVDLLFKTNRKVTVKQLKEDYFKKIECFDSVEISGVEDRFNASLGTYHDLLKIIKDKDFLDNEENEDILEDIVLTLTLFEDREMIEERLKTYAHLFDDKVMKQLKRRRYTGWGRLSRKLINGIRDKQSGKTILDFLKSDGFANRNFMQLIHDDSLTFKEDIQKAQVSGQGDSLHEHIANLAGSPAIKKGILQTVKVVDELVKVMGRHKPENIVIXMARENQTTQKGQKNSRERMKRIEEGIKELGSQILKEHPVENTQLQNEKLYLYYLQNGRDMYVDQELDINRLSDYDVDHIVPQSFLKDDSIDNKVLTRSDKNRGKSDNVPSEEVVKKMKNYWRQLLNAKLITQRKFDNLTKAERGGLSELDKAGFIKRQLVETRQITKHVAQILDSRMNTKYDENDKLIREVKVITLKSKLVSDFRKDFQFYKVREINNYHHAHDAYLNAVVGTALIKKYPKLESEFVYGDYKVYDVRKMIAKSEQEIGKATAKYFFYSNIMNFFKTEITLANGEIRKRPLIETNGETGEIVWDKGRDFATVRKVLSMPQVNIVKKTEVQTGGFSKESILPKRNSDKLIARKKDWDPKKYGGFDSPTVAYSVLVVAKVEKGKSKKLKSVKELLGITIMERSSFEKNPIDFLEAKGYKEVKKDLIIKLPKYSLFELENGRKRMLASAGELQKGNELALPSKYVNFLYLASHYEKLKGSPEDNEQKQLFVEQHKHYLDEIIEQISEFSKRVILADANLDKVLSAYNKHRDKPIREQAENIIHLFTLTNLGAPAAFKYFDTTIDRKRYTSTKEVLDATLIHQSITGLYETRIDLSQLGGD

SEQ ID NO: 44 - protein, 1368 aa, Streptococcus pyogenes
MDKKYSIGLDIGTNSVGWAVITDEYKVPSKKFKVLGNTDRHSIKKNLIGALLFDSGETAEATRLKRTARRRYTRRKNRICYLQEIFSNEMAKVDDSFFHRLEESFLVEEDKKHERHPIFGNIVDEVAYHEKYPTIYHLRKKLVDSTDKADLRLIYLALAHMIKFRGHFLIEGDLNPDNSDVDKLFIQLVQTYNQLFEENPINASGVDAKAILSARLSKSRRLENLIAQLPGEKKNGLFGNLIALSLGLTPNFKSNFDLAEDAKLQLSKDTYDDDLDNLLAQIGDQYADLFLAAKNLSDAILLSDILRVNTEITKAPLSASMIKRYDEHHQDLTLLKALVRQQLPEKYKEIFFDQSKNGYAGYIDGGASQEEFYKFIKPILEKMDGTEELLVKLNREDLLRKQRTFDNGSIPHQIHLGELHAILRRQEDFYPFLKDNREKIEKILTFRIPYYVGPLARGNSRFAWMTRKSEETITPWNFEEVVDKGASAQSFIERMTNFDKNLPNEKVLPKHSLLYEYFTVYNELTKVKYVTEGMRKPAFLSGEQKKAIVDLLFKTNRKVTVKQLKEDYFKKIECFDSVEISGVEDRFNASLGTYHDLLKIIKDKDFLDNEENEDILEDIVLTLTLFEDREMIEERLKTYAHLFDDKVMKQLKRRRYTGWGRLSRKLINGIRDKQSGKTILDFLKSDGFANRNFMQLIHDDSLTFKEDIQKAQVSGQGDSLHEHIANLAGSPAIKKGILQTVKVVDELVKVMGRHKPENIVIEMARENQTTQKGQKNSRERMKRIEEGIKELGSQILKEHPVENTQLQNEKLYLYYLQNGRDMYVDQELDINRLSDYDVDHIVPQSFLKDDSIDNKVLTRSDKNRGKSDNVPSEEVVKKMKNYWRQLLNAKLITQRKFDNLTKAERGGLSELDKAGFIKRQLVETRQITKHVAQILDSRMNTKYDENDKLIREVKVITLKSKLVSDFRKDFQFYKVREINNYHXAHDAYLNAVVGTALIKKYPKLESEFVYGDYKVYDVRKMIAKSEQEIGKATAKYFFYSNIMNFFKTEITLANGEIRKRPLIETNGETGEIVWDKGRDFATVRKVLSMPQVNIVKKTEVQTGGFSKESILPKRNSDKLIARKKDWDPKKYGGFDSPTVAYSVLVVAKVEKGKSKKLKSVKELLGITIMERSSFEKNPIDFLEAKGYKEVKKDLIIKLPKYSLFELENGRKRMLASAGELQKGNELALPSKYVNFLYLASHYEKLKGSPEDNEQKQLFVEQHKHYLDEIIEQISEFSKRVILADANLDKVLSAYNKHRDKPIREQAENIIHLFTLTNLGAPAAFKYFDTTIDRKRYTSTKEVLDATLIHQSITGLYETRIDLSQLGGD

SEQ ID NO: 45 - protein, 1368 aa, Streptococcus pyogenes
MDKKYSIGLDIGTNSVGWAVITDEYKVPSKKFKVLGNTDRHSIKKNLIGALLFDSGETAEATRLKRTARRRYTRRKNRICYLQEIFSNEMAKVDDSFFHRLEESFLVEEDKKHERHPIFGNIVDEVAYHEKYPTIYHLRKKLVDSTDKADLRLIYLALAHMIKFRGHFLIEGDLNPDNSDVDKLFIQLVQTYNQLFEENPINASGVDAKAILSARLSKSRRLENLIAQLPGEKKNGLFGNLIALSLGLTPNFKSNFDLAEDAKLQLSKDTYDDDLDNLLAQIGDQYADLFLAAKNLSDAILLSDILRVNTEITKAPLSASMIKRYDEHHQDLTLLKALVRQQLPEKYKEIFFDQSKNGYAGYIDGGASQEEFYKFIKPILEKMDGTEELLVKLNREDLLRKQRTFDNGSIPHQIHLGELHAILRRQEDFYPFLKDNREKIEKILTFRIPYYVGPLARGNSRFAWMTRKSEETITPWNFEEVVDKGASAQSFIERMTNFDKNLPNEKVLPKHSLLYEYFTVYNELTKVKYVTEGMRKPAFLSGEQKKAIVDLLFKTNRKVTVKQLKEDYFKKIECFDSVEISGVEDRFNASLGTYHDLLKIIKDKDFLDNEENEDILEDIVLTLTLFEDREMIEERLKTYAHLFDDKVMKQLKRRRYTGWGRLSRKLINGIRDKQSGKTILDFLKSDGFANRNFMQLIHDDSLTFKEDIQKAQVSGQGDSLHEHIANLAGSPAIKKGILQTVKVVDELVKVMGRHKPENIVIEMARENQTTQKGQKNSRERMKRIEEGIKELGSQILKEHPVENTQLQNEKLYLYYLQNGRDMYVDQELDINRLSDYDVDHIVPQSFLKDDSIDNKVLTRSDKNRGKSDNVPSEEVVKKMKNYWRQLLNAKLITQRKFDNLTKAERGGLSELDKAGFIKRQLVETRQITKHVAQILDSRMNTKYDENDKLIREVKVITLKSKLVSDFRKDFQFYKVREINNYHHAHXAYLNAVVGTALIKKYPKLESEFVYGDYKVYDVRKMIAKSEQEIGKATAKYFFYSNIMNFFKTEITLANGEIRKRPLIETNGETGEIVWDKGRDFATVRKVLSMPQVNIVKKTEVQTGGFSKESILPKRNSDKLIARKKDWDPKKYGGFDSPTVAYSVLVVAKVEKGKSKKLKSVKELLGITIMERSSFEKNPIDFLEAKGYKEVKKDLIIKLPKYSLFELENGRKRMLASAGELQKGNELALPSKYVNFLYLASHYEKLKGSPEDNEQKQLFVEQHKHYLDEIIEQISEFSKRVILADANLDKVLSAYNKHRDKPIREQAENIIHLFTLTNLGAPAAFKYFDTTIDRKRYTSTKEVLDATLIHQSITGLYETRIDLSQLGGD

SEQ ID NO: 46 - protein, 1368 aa, Streptococcus pyogenes
MDKKYSIGLAIGTNSVGWAVITDEYKVPSKKFKVLGNTDRHSIKKNLIGALLFDSGETAEATRLKRTARRRYTRRKNRICYLQEIFSNEMAKVDDSFFHRLEESFLVEEDKKHERHPIFGNIVDEVAYHEKYPTIYHLRKKLVDSTDKADLRLIYLALAHMIKFRGHFLIEGDLNPDNSDVDKLFIQLVQTYNQLFEENPINASGVDAKAILSARLSKSRRLENLIAQLPGEKKNGLFGNLIALSLGLTPNFKSNFDLAEDAKLQLSKDTYDDDLDNLLAQIGDQYADLFLAAKNLSDAILLSDILRVNTEITKAPLSASMIKRYDEHHQDLTLLKALVRQQLPEKYKEIFFDQSKNGYAGYIDGGASQEEFYKFIKPILEKMDGTEELLVKLNREDLLRKQRTFDNGSIPHQIHLGELHAILRRQEDFYPFLKDNREKIEKILTFRIPYYVGPLARGNSRFAWMTRKSEETITPWNFEEVVDKGASAQSFIERMTNFDKNLPNEKVLPKHSLLYEYFTVYNELTKVKYVTEGMRKPAFLSGEQKKAIVDLLFKTNRKVTVKQLKEDYFKKIECFDSVEISGVEDRFNASLGTYHDLLKIIKDKDFLDNEENEDILEDIVLTLTLFEDREMIEERLKTYAHLFDDKVMKQLKRRRYTGWGRLSRKLINGIRDKQSGKTILDFLKSDGFANRNFMQLIHDDSLTFKEDIQKAQVSGQGDSLHEHIANLAGSPAIKKGILQTVKVVDELVKVMGRHKPENIVIEMARENQTTQKGQKNSRERMKRIEEGIKELGSQILKEHPVENTQLQNEKLYLYYLQNGRDMYVDQELDINRLSDYDVDHIVPQSFLKDDSIDNKVLTRSDKNRGKSDNVPSEEVVKKMKNYWRQLLNAKLITQRKFDNLTKAERGGLSELDKAGFIKRQLVETRQITKHVAQILDSRMNTKYDENDKLIREVKVITLKSKLVSDFRKDFQFYKVREINNYHHAHDAYLNAVVGTALIKKYPKLESEFVYGDYKVYDVRKMIAKSEQEIGKATAKYFFYSNIMNFFKTEITLANGEIRKRPLIETNGETGEIVWDKGRDFATVRKVLSMPQVNIVKKTEVQTGGFSKESILPKRNSDKLIARKKDWDPKKYGGFDSPTVAYSVLVVAKVEKGKSKKLKSVKELLGITIMERSSFEKNPIDFLEAKGYKEVKKDLIIKLPKYSLFELENGRKRMLASAGELQKGNELALPSKYVNFLYLASHYEKLKGSPEDNEQKQLFVEQHKHYLDEIIEQISEFSKRVILADANLDKVLSAYNKHRDKPIREQAENIIHLFTLTNLGAPAAFKYFDTTIDRKRYTSTKEVLDATLIHQSITGLYETRIDLSQLGGD

SEQ ID NO: 47 - protein, 1368 aa, Streptococcus pyogenes
MDKKYSIGLDIGTNSVGWAVITDEYKVPSKKFKVLGNTDRHSIKKNLIGALLFDSGETAEATRLKRTARRRYTRRKNRICYLQEIFSNEMAKVDDSFFHRLEESFLVEEDKKHERHPIFGNIVDEVAYHEKYPTIYHLRKKLVDSTDKADLRLIYLALAHMIKFRGHFLIEGDLNPDNSDVDKLFIQLVQTYNQLFEENPINASGVDAKAILSARLSKSRRLENLIAQLPGEKKNGLFGNLIALSLGLTPNFKSNFDLAEDAKLQLSKDTYDDDLDNLLAQIGDQYADLFLAAKNLSDAILLSDILRVNTEITKAPLSASMIKRYDEHHQDLTLLKALVRQQLPEKYKEIFFDQSKNGYAGYIDGGASQEEFYKFIKPILEKMDGTEELLVKLNREDLLRKQRTFDNGSIPHQIHLGELHAILRRQEDFYPFLKDNREKIEKILTFRIPYYVGPLARGNSRFAWMTRKSEETITPWNFEEVVDKGASAQSFIERMTNFDKNLPNEKVLPKHSLLYEYFTVYNELTKVKYVTEGMRKPAFLSGEQKKAIVDLLFKTNRKVTVKQLKEDYFKKIECFDSVEISGVEDRFNASLGTYHDLLKIIKDKDFLDNEENEDILEDIVLTLTLFEDREMIEERLKTYAHLFDDKVMKQLKRRRYTGWGRLSRKLINGIRDKQSGKTILDFLKSDGFANRNFMQLIHDDSLTFKEDIQKAQVSGQGDSLHEHIANLAGSPAIKKGILQTVKVVDELVKVMGRHKPENIVIAMARENQTTQKGQKNSRERMKRIEEGIKELGSQILKEHPVENTQLQNEKLYLYYLQNGRDMYVDQELDINRLSDYDVDHIVPQSFLKDDSIDNKVLTRSDKNRGKSDNVPSEEVVKKMKNYWRQLLNAKLITQRKFDNLTKAERGGLSELDKAGFIKRQLVETRQITKHVAQILDSRMNTKYDENDKLIREVKVITLKSKLVSDFRKDFQFYKVREINNYHHAHDAYLNAVVGTALIKKYPKLESEFVYGDYKVYDVRKMIAKSEQEIGKATAKYFFYSNIMNFFKTEITLANGEIRKRPLIETNGETGEIVWDKGRDFATVRKVLSMPQVNIVKKTEVQTGGFSKESILPKRNSDKLIARKKDWDPKKYGGFDSPTVAYSVLVVAKVEKGKSKKLKSVKELLGITIMERSSFEKNPIDFLEAKGYKEVKKDLIIKLPKYSLFELENGRKRMLASAGELQKGNELALPSKYVNFLYLASHYEKLKGSPEDNEQKQLFVEQHKHYLDEIIEQISEFSKRVILADANLDKVLSAYNKHRDKPIREQAENIIHLFTLTNLGAPAAFKYFDTTIDRKRYTSTKEVLDATLIHQSITGLYETRIDLSQLGGD

SEQ ID NO: 48 - protein, 1368 aa, Streptococcus pyogenes
MDKKYSIGLDIGTNSVGWAVITDEYKVPSKKFKVLGNTDRHSIKKNLIGALLFDSGETAEATRLKRTARRRYTRRKNRICYLQEIFSNEMAKVDDSFFHRLEESFLVEEDKKHERHPIFGNIVDEVAYHEKYPTIYHLRKKLVDSTDKADLRLIYLALAHMIKFRGHFLIEGDLNPDNSDVDKLFIQLVQTYNQLFEENPINASGVDAKAILSARLSKSRRLENLIAQLPGEKKNGLFGNLIALSLGLTPNFKSNFDLAEDAKLQLSKDTYDDDLDNLLAQIGDQYADLFLAAKNLSDAILLSDILRVNTEITKAPLSASMIKRYDEHHQDLTLLKALVRQQLPEKYKEIFFDQSKNGYAGYIDGGASQEEFYKFIKPILEKMDGTEELLVKLNREDLLRKQRTFDNGSIPHQIHLGELHAILRRQEDFYPFLKDNREKIEKILTFRIPYYVGPLARGNSRFAWMTRKSEETITPWNFEEVVDKGASAQSFIERMTNFDKNLPNEKVLPKHSLLYEYFTVYNELTKVKYVTEGMRKPAFLSGEQKKAIVDLLFKTNRKVTVKQLKEDYFKKIECFDSVEISGVEDRFNASLGTYHDLLKIIKDKDFLDNEENEDILEDIVLTLTLFEDREMIEERLKTYAHLFDDKVMKQLKRRRYTGWGRLSRKLINGIRDKQSGKTILDFLKSDGFANRNFMQLIHDDSLTFKEDIQKAQVSGQGDSLHEHIANLAGSPAIKKGILQTVKVVDELVKVMGRHKPENIVIEMARENQTTQKGQKNSRERMKRIEEGIKELGSQILKEHPVENTQLQNEKLYLYYLQNGRDMYVDQELDINRLSDYDVDHIVPQSFLKDDSIDNKVLTRSDKNRGKSDNVPSEEVVKKMKNYWRQLLNAKLITQRKFDNLTKAERGGLSELDKAGFIKRQLVETRQITKHVAQILDSRMNTKYDENDKLIREVKVITLKSKLVSDFRKDFQFYKVREINNYHAAHDAYLNAVVGTALIKKYPKLESEFVYGDYKVYDVRKMIAKSEQEIGKATAKYFFYSNIMNFFKTEITLANGEIRKRPLIETNGETGEIVWDKGRDFATVRKVLSMPQVNIVKKTEVQTGGFSKESILPKRNSDKLIARKKDWDPKKYGGFDSPTVAYSVLVVAKVEKGKSKKLKSVKELLGITIMERSSFEKNPIDFLEAKGYKEVKKDLIIKLPKYSLFELENGRKRMLASAGELQKGNELALPSKYVNFLYLASHYEKLKGSPEDNEQKQLFVEQHKHYLDEIIEQISEFSKRVILADANLDKVLSAYNKHRDKPIREQAENIIHLFTLTNLGAPAAFKYFDTTIDRKRYTSTKEVLDATLIHQSITGLYETRIDLSQLGGD

SEQ ID NO: 49 - protein, 1368 aa, Streptococcus pyogenes
MDKKYSIGLDIGTNSVGWAVITDEYKVPSKKFKVLGNTDRHSIKKNLIGALLFDSGETAEATRLKRTARRRYTRRKNRICYLQEIFSNEMAKVDDSFFHRLEESFLVEEDKKHERHPIFGNIVDEVAYHEKYPTIYHLRKKLVDSTDKADLRLIYLALAHMIKFRGHFLIEGDLNPDNSDVDKLFIQLVQTYNQLFEENPINASGVDAKAILSARLSKSRRLENLIAQLPGEKKNGLFGNLIALSLGLTPNFKSNFDLAEDAKLQLSKDTYDDDLDNLLAQIGDQYADLFLAAKNLSDAILLSDILRVNTEITKAPLSASMIKRYDEHHQDLTLLKALVRQQLPEKYKEIFFDQSKNGYAGYIDGGASQEEFYKFIKPILEKMDGTEELLVKLNREDLLRKQRTFDNGSIPHQIHLGELHAILRRQEDFYPFLKDNREKIEKILTFRIPYYVGPLARGNSRFAWMTRKSEETITPWNFEEVVDKGASAQSFIERMTNFDKNLPNEKVLPKHSLLYEYFTVYNELTKVKYVTEGMRKPAFLSGEQKKAIVDLLFKTNRKVTVKQLKEDYFKKIECFDSVEISGVEDRFNASLGTYHDLLKIIKDKDFLDNEENEDILEDIVLTLTLFEDREMIEERLKTYAHLFDDKVMKQLKRRRYTGWGRLSRKLINGIRDKQSGKTILDFLKSDGFANRNFMQLIHDDSLTFKEDIQKAQVSGQGDSLHEHIANLAGSPAIKKGILQTVKVVDELVKVMGRHKPENIVIEMARENQTTQKGQKNSRERMKRIEEGIKELGSQILKEHPVENTQLQNEKLYLYYLQNGRDMYVDQELDINRLSDYDVDHIVPQSFLKDDSIDNKVLTRSDKNRGKSDNVPSEEVVKKMKNYWRQLLNAKLITQRKFDNLTKAERGGLSELDKAGFIKRQLVETRQITKHVAQILDSRMNTKYDENDKLIREVKVITLKSKLVSDFRKDFQFYKVREINNYHHAHAAYLNAVVGTALIKKYPKLESEFVYGDYKVYDVRKMIAKSEQEIGKATAKYFFYSNIMNFFKTEITLANGEIRKRPLIETNGETGEIVWDKGRDFATVRKVLSMPQVNIVKKTEVQTGGFSKESILPKRNSDKLIARKKDWDPKKYGGFDSPTVAYSVLVVAKVEKGKSKKLKSVKELLGITIMERSSFEKNPIDFLEAKGYKEVKKDLIIKLPKYSLFELENGRKRMLASAGELQKGNELALPSKYVNFLYLASHYEKLKGSPEDNEQKQLFVEQHKHYLDEIIEQISEFSKRVILADANLDKVLSAYNKHRDKPIREQAENIIHLFTLTNLGAPAAFKYFDTTIDRKRYTSTKEVLDATLIHQSITGLYETRIDLSQLGGD

SEQ ID NO: 50 - protein, 1368 aa, Streptococcus pyogenes
MDKKYSIGLDIGTNSVGWAVITDEYKVPSKKFKVLGNTDRHSIKKNLIGALLFDSGETAEATRLKRTARRRYTRRKNRICYLQEIFSNEMAKVDDSFFHRLEESFLVEEDKKHERHPIFGNIVDEVAYHEKYPTIYHLRKKLVDSTDKADLRLIYLALAHMIKFRGHFLIEGDLNPDNSDVDKLFIQLVQTYNQLFEENPINASGVDAKAILSARLSKSRRLENLIAQLPGEKKNGLFGNLIALSLGLTPNFKSNFDLAEDAKLQLSKDTYDDDLDNLLAQIGDQYADLFLAAKNLSDAILLSDILRVNTEITKAPLSASMIKRYDEHHQDLTLLKALVRQQLPEKYKEIFFDQSKNGYAGYIDGGASQEEFYKFIKPILEKMDGTEELLVKLNREDLLRKQRTFDNGSIPHQIHLGELHAILRRQEDFYPFLKDNREKIEKILTFRIPYYVGPLARGNSRFAWMTRKSEETITPWNFEEVVDKGASAQSFIERMTNFDKNLPNEKVLPKHSLLYEYFTVYNELTKVKYVTEGMRKPAFLSGEQKKAIVDLLFKTNRKVTVKQLKEDYFKKIECFDSVEISGVEDRFNASLGTYHDLLKIIKDKDFLDNEENEDILEDIVLTLTLFEDREMIEERLKTYAHLFDDKVMKQLKRRRYTGWGRLSRKLINGIRDKQSGKTILDFLKSDGFANRNFMQLIHDDSLTFKEDIQKAQVSGQGDSLHEHIANLAGSPAIKKGILQTVKVVDELVKVMGRHKPENIVIEMARENQTTQKGQKNSRERMKRIEEGIKELGSQILKEHPVENTQLQNEKLYLYYLQNGRDMYVDQELDINRLSDYDVDXIVPQSFLKDDSIDNKVLTRSDKNRGKSDNVPSEEVVKKMKNYWRQLLNAKLITQRKFDNLTKAERGGLSELDKAGFIKRQLVETRQITKHVAQILDSRMNTKYDENDKLIREVKVITLKSKLVSDFRKDFQFYKVREINNYHHAHDAYLNAVVGTALIKKYPKLESEFVYGDYKVYDVRKMIAKSEQEIGKATAKYFFYSNIMNFFKTEITLANGEIRKRPLIETNGETGEIVWDKGRDFATVRKVLSMPQVNIVKKTEVQTGGFSKESILPKRNSDKLIARKKDWDPKKYGGFDSPTVAYSVLVVAKVEKGKSKKLKSVKELLGITIMERSSFEKNPIDFLEAKGYKEVKKDLIIKLPKYSLFELENGRKRMLASAGELQKGNELALPSKYVNFLYLASHYEKLKGSPEDNEQKQLFVEQHKHYLDEIIEQISEFSKRVILADANLDKVLSAYNKHRDKPIREQAENIIHLFTLTNLGAPAAFKYFDTTIDRKRYTSTKEVLDATLIHQSITGLYETRIDLSQLGGD

SEQ ID NO: 51 - protein, 1368 aa, Streptococcus pyogenes
MDKKYSIGLDIGTNSVGWAVITDEYKVPSKKFKVLGNTDRHSIKKNLIGALLFDSGETAEATRLKRTARRRYTRRKNRICYLQEIFSNEMAKVDDSFFHRLEESFLVEEDKKHERHPIFGNIVDEVAYHEKYPTIYHLRKKLVDSTDKADLRLIYLALAHMIKFRGHFLIEGDLNPDNSDVDKLFIQLVQTYNQLFEENPINASGVDAKAILSARLSKSRRLENLIAQLPGEKKNGLFGNLIALSLGLTPNFKSNFDLAEDAKLQLSKDTYDDDLDNLLAQIGDQYADLFLAAKNLSDAILLSDILRVNTEITKAPLSASMIKRYDEHHQDLTLLKALVRQQLPEKYKEIFFDQSKNGYAGYIDGGASQEEFYKFIKPILEKMDGTEELLVKLNREDLLRKQRTFDNGSIPHQIHLGELHAILRRQEDFYPFLKDNREKIEKILTFRIPYYVGPLARGNSRFAWMTRKSEETITPWNFEEVVDKGASAQSFIERMTNFDKNLPNEKVLPKHSLLYEYFTVYNELTKVKYVTEGMRKPAFLSGEQKKAIVDLLFKTNRKVTVKQLKEDYFKKIECFDSVEISGVEDRFNASLGTYHDLLKIIKDKDFLDNEENEDILEDIVLTLTLFEDREMIEERLKTYAHLFDDKVMKQLKRRRYTGWGRLSRKLINGIRDKQSGKTILDFLKSDGFANRNFMQLIHDDSLTFKEDIQKAQVSGQGDSLHEHIANLAGSPAIKKGILQTVKVVDELVKVMGRHKPENIVIEMARENQTTQKGQKNSRERMKRIEEGIKELGSQILKEHPVENTQLQNEKLYLYYLQNGRDMYVDQELDINRLSDYDVDAIVPQSFLKDDSIDNKVLTRSDKNRGKSDNVPSEEVVKKMKNYWRQLLNAKLITQRKFDNLTKAERGGLSELDKAGFIKRQLVETRQITKHVAQILDSRMNTKYDENDKLIREVKVITLKSKLVSDFRKDFQFYKVREINNYHHAHDAYLNAVVGTALIKKYPKLESEFVYGDYKVYDVRKMIAKSEQEIGKATAKYFFYSNIMNFFKTEITLANGEIRKRPLIETNGETGEIVWDKGRDFATVRKVLSMPQVNIVKKTEVQTGGFSKESILPKRNSDKLIARKKDWDPKKYGGFDSPTVAYSVLVVAKVEKGKSKKLKSVKELLGITIMERSSFEKNPIDFLEAKGYKEVKKDLIIKLPKYSLFELENGRKRMLASAGELQKGNELALPSKYVNFLYLASHYEKLKGSPEDNEQKQLFVEQHKHYLDEIIEQISEFSKRVILADANLDKVLSAYNKHRDKPIREQAENIIHLFTLTNLGAPAAFKYFDTTIDRKRYTSTKEVLDATLIHQSITGLYETRIDLSQLGGD

SEQ ID NO: 52 - protein, 1368 aa, Streptococcus pyogenes
MDKKYSIGLDIGTNSVGWAVITDEYKVPSKKFKVLGNTDRHSIKKNLIGALLFDSGETAEATRLKRTARRRYTRRKNRICYLQEIFSNEMAKVDDSFFHRLEESFLVEEDKKHERHPIFGNIVDEVAYHEKYPTIYHLRKKLVDSTDKADLRLIYLALAHMIKFRGHFLIEGDLNPDNSDVDKLFIQLVQTYNQLFEENPINASGVDAKAILSARLSKSRRLENLIAQLPGEKKNGLFGNLIALSLGLTPNFKSNFDLAEDAKLQLSKDTYDDDLDNLLAQIGDQYADLFLAAKNLSDAILLSDILRVNTEITKAPLSASMIKRYDEHHQDLTLLKALVRQQLPEKYKEIFFDQSKNGYAGYIDGGASQEEFYKFIKPILEKMDGTEELLVKLNREDLLRKQRTFDNGSIPHQIHLGELHAILRRQEDFYPFLKDNREKIEKILTFRIPYYVGPLARGNSRFAWMTRKSEETITPWNFEEVVDKGASAQSFIERMTNFDKNLPNEKVLPKHSLLYEYFTVYNELTKVKYVTEGMRKPAFLSGEQKKAIVDLLFKTNRKVTVKQLKEDYFKKIECFDSVEISGVEDRFNASLGTYHDLLKIIKDKDFLDNEENEDILEDIVLTLTLFEDREMIEERLKTYAHLFDDKVMKQLKRRRYTGWGRLSRKLINGIRDKQSGKTILDFLKSDGFANRNFMQLIHDDSLTFKEDIQKAQVSGQGDSLHEHIANLAGSPAIKKGILQTVKVVDELVKVMGRHKPENIVIEMARENQTTQKGQKNSRERMKRIEEGIKELGSQILKEHPVENTQLQNEKLYLYYLQNGRDMYVDQELDINRLSDYDVDHIVPQSFLKDDSIDNKVLTRSDKNXGKSDNVPSEEVVKKMKNYWRQLLNAKLITQRKFDNLTKAERGGLSELDKAGFIKRQLVETRQITKHVAQILDSRMNTKYDENDKLIREVKVITLKSKLVSDFRKDFQFYKVREINNYHHAHDAYLNAVVGTALIKKYPKLESEFVYGDYKVYDVRKMIAKSEQEIGKATAKYFFYSNIMNFFKTEITLANGEIRKRPLIETNGETGEIVWDKGRDFATVRKVLSMPQVNIVKKTEVQTGGFSKESILPKRNSDKLIARKKDWDPKKYGGFDSPTVAYSVLVVAKVEKGKSKKLKSVKELLGITIMERSSFEKNPIDFLEAKGYKEVKKDLIIKLPKYSLFELENGRKRMLASAGELQKGNELALPSKYVNFLYLASHYEKLKGSPEDNEQKQLFVEQHKHYLDEIIEQISEFSKRVILADANLDKVLSAYNKHRDKPIREQAENIIHLFTLTNLGAPAAFKYFDTTIDRKRYTSTKEVLDATLIHQSITGLYETRIDLSQLGGD

SEQ ID NO: 53 - protein, 1368 aa, Streptococcus pyogenes
MDKKYSIGLDIGTNSVGWAVITDEYKVPSKKFKVLGNTDRHSIKKNLIGALLFDSGETAEATRLKRTARRRYTRRKNRICYLQEIFSNEMAKVDDSFFHRLEESFLVEEDKKHERHPIFGNIVDEVAYHEKYPTIYHLRKKLVDSTDKADLRLIYLALAHMIKFRGHFLIEGDLNPDNSDVDKLFIQLVQTYNQLFEENPINASGVDAKAILSARLSKSRRLENLIAQLPGEKKNGLFGNLIALSLGLTPNFKSNFDLAEDAKLQLSKDTYDDDLDNLLAQIGDQYADLFLAAKNLSDAILLSDILRVNTEITKAPLSASMIKRYDEHHQDLTLLKALVRQQLPEKYKEIFFDQSKNGYAGYIDGGASQEEFYKFIKPILEKMDGTEELLVKLNREDLLRKQRTFDNGSIPHQIHLGELHAILRRQEDFYPFLKDNREKIEKILTFRIPYYVGPLARGNSRFAWMTRKSEETITPWNFEEVVDKGASAQSFIERMTNFDKNLPNEKVLPKHSLLYEYFTVYNELTKVKYVTEGMRKPAFLSGEQKKAIVDLLFKTNRKVTVKQLKEDYFKKIECFDSVEISGVEDRFNASLGTYHDLLKIIKDKDFLDNEENEDILEDIVLTLTLFEDREMIEERLKTYAHLFDDKVMKQLKRRRYTGWGRLSRKLINGIRDKQSGKTILDFLKSDGFANRNFMQLIHDDSLTFKEDIQKAQVSGQGDSLHEHIANLAGSPAIKKGILQTVKVVDELVKVMGRHKPENIVIEMARENQTTQKGQKNSRERMKRIEEGIKELGSQILKEHPVENTQLQNEKLYLYYLQNGRDMYVDQELDINRLSDYDVDHIVPQSFLKDDSIDNKVLTRSDKNAGKSDNVPSEEVVKKMKNYWRQLLNAKLITQRKFDNLTKAERGGLSELDKAGFIKRQLVETRQITKHVAQILDSRMNTKYDENDKLIREVKVITLKSKLVSDFRKDFQFYKVREINNYHHAHDAYLNAVVGTALIKKYPKLESEFVYGDYKVYDVRKMIAKSEQEIGKATAKYFFYSNIMNFFKTEITLANGEIRKRPLIETNGETGEIVWDKGRDFATVRKVLSMPQVNIVKKTEVQTGGFSKESILPKRNSDKLIARKKDWDPKKYGGFDSPTVAYSVLVVAKVEKGKSKKLKSVKELLGITIMERSSFEKNPIDFLEAKGYKEVKKDLIIKLPKYSLFELENGRKRMLASAGELQKGNELALPSKYVNFLYLASHYEKLKGSPEDNEQKQLFVEQHKHYLDEIIEQISEFSKRVILADANLDKVLSAYNKHRDKPIREQAENIIHLFTLTNLGAPAAFKYFDTTIDRKRYTSTKEVLDATLIHQSITGLYETRIDLSQLGGD

SEQ ID NO: 54 - protein, 1367 aa, Streptococcus pyogenes
DKKYSIGLDIGTNSVGWAVITDEYKVPSKKFKVLGNTDRHSIKKNLIGALLFDSGETAEATRLKRTARRRYTRRKNRICYLQEIFSNEMAKVDDSFFHRLEESFLVEEDKKHERHPIFGNIVDEVAYHEKYPTIYHLRKKLVDSTDKADLRLIYLALAHMIKFRGHFLIEGDLNPDNSDVDKLFIQLVQTYNQLFEENPINASGVDAKAILSARLSKSRRLENLIAQLPGEKKNGLFGNLIALSLGLTPNFKSNFDLAEDAKLQLSKDTYDDDLDNLLAQIGDQYADLFLAAKNLSDAILLSDILRVNTEITKAPLSASMIKRYDEHHQDLTLLKALVRQQLPEKYKEIFFDQSKNGYAGYIDGGASQEEFYKFIKPILEKMDGTEELLVKLNREDLLRKQRTFDNGSIPHQIHLGELHAILRRQEDFYPFLKDNREKIEKILTFRIPYYVGPLARGNSRFAWMTRKSEETITPWNFEEVVDKGASAQSFIERMTNFDKNLPNEKVLPKHSLLYEYFTVYNELTKVKYVTEGMRKPAFLSGEQKKAIVDLLFKTNRKVTVKQLKEDYFKKIECFDSVEISGVEDRFNASLGTYHDLLKIIKDKDFLDNEENEDILEDIVLTLTLFEDREMIEERLKTYAHLFDDKVMKQLKRRRYTGWGRLSRKLINGIRDKQSGKTILDFLKSDGFANRNFMQLIHDDSLTFKEDIQKAQVSGQGDSLHEHIANLAGSPAIKKGILQTVKVVDELVKVMGRHKPENIVIEMARENQTTQKGQKNSRERMKRIEEGIKELGSQILKEHPVENTQLQNEKLYLYYLQNGRDMYVDQELDINRLSDYDVDXIVPQSFLKDDSIDNKVLTRSDKNRGKSDNVPSEEVVKKMKNYWRQLLNAKLITQRKFDNLTKAERGGLSELDKAGFIKRQLVETRQITKHVAQILDSRMNTKYDENDKLIREVKVITLKSKLVSDFRKDFQFYKVREINNYHHAHDAYLNAVVGTALIKKYPKLESEFVYGDYKVYDVRKMIAKSEQEIGKATAKYFFYSNIMNFFKTEITLANGEIRKRPLIETNGETGEIVWDKGRDFATVRKVLSMPQVNIVKKTEVQTGGFSKESILPKRNSDKLIARKKDWDPKKYGGFDSPTVAYSVLVVAKVEKGKSKKLKSVKELLGITIMERSSFEKNPIDFLEAKGYKEVKKDLIIKLPKYSLFELENGRKRMLASAGELQKGNELALPSKYVNFLYLASHYEKLKGSPEDNEQKQLFVEQHKHYLDEIIEQISEFSKRVILADANLDKVLSAYNKHRDKPIREQAENIIHLFTLTNLGAPAAFKYFDTTIDRKRYTSTKEVLDATLIHQSITGLYETRIDLSQLGGD

SEQ ID NO: 55 - protein, 1367 aa, Streptococcus pyogenes
DKKYSIGLDIGTNSVGWAVITDEYKVPSKKFKVLGNTDRHSIKKNLIGALLFDSGETAEATRLKRTARRRYTRRKNRICYLQEIFSNEMAKVDDSFFHRLEESFLVEEDKKHERHPIFGNIVDEVAYHEKYPTIYHLRKKLVDSTDKADLRLIYLALAHMIKFRGHFLIEGDLNPDNSDVDKLFIQLVQTYNQLFEENPINASGVDAKAILSARLSKSRRLENLIAQLPGEKKNGLFGNLIALSLGLTPNFKSNFDLAEDAKLQLSKDTYDDDLDNLLAQIGDQYADLFLAAKNLSDAILLSDILRVNTEITKAPLSASMIKRYDEHHQDLTLLKALVRQQLPEKYKEIFFDQSKNGYAGYIDGGASQEEFYKFIKPILEKMDGTEELLVKLNREDLLRKQRTFDNGSIPHQIHLGELHAILRRQEDFYPFLKDNREKIEKILTFRIPYYVGPLARGNSRFAWMTRKSEETITPWNFEEVVDKGASAQSFIERMTNFDKNLPNEKVLPKHSLLYEYFTVYNELTKVKYVTEGMRKPAFLSGEQKKAIVDLLFKTNRKVTVKQLKEDYFKKIECFDSVEISGVEDRFNASLGTYHDLLKIIKDKDFLDNEENEDILEDIVLTLTLFEDREMIEERLKTYAHLFDDKVMKQLKRRRYTGWGRLSRKLINGIRDKQSGKTILDFLKSDGFANRNFMQLIHDDSLTFKEDIQKAQVSGQGDSLHEHIANLAGSPAIKKGILQTVKVVDELVKVMGRHKPENIVIEMARENQTTQKGQKNSRERMKRIEEGIKELGSQILKEHPVENTQLQNEKLYLYYLQNGRDMYVDQELDINRLSDYDVDAIVPQSFLKDDSIDNKVLTRSDKNRGKSDNVPSEEVVKKMKNYWRQLLNAKLITQRKFDNLTKAERGGLSELDKAGFIKRQLVETRQITKHVAQILDSRMNTKYDENDKLIREVKVITLKSKLVSDFRKDFQFYKVREINNYHHAHDAYLNAVVGTALIKKYPKLESEFVYGDYKVYDVRKMIAKSEQEIGKATAKYFFYSNIMNFFKTEITLANGEIRKRPLIETNGETGEIVWDKGRDFATVRKVLSMPQVNIVKKTEVQTGGFSKESILPKRNSDKLIARKKDWDPKKYGGFDSPTVAYSVLVVAKVEKGKSKKLKSVKELLGITIMERSSFEKNPIDFLEAKGYKEVKKDLIIKLPKYSLFELENGRKRMLASAGELQKGNELALPSKYVNFLYLASHYEKLKGSPEDNEQKQLFVEQHKHYLDEIIEQISEFSKRVILADANLDKVLSAYNKHRDKPIREQAENIIHLFTLTNLGAPAAFKYFDTTIDRKRYTSTKEVLDATLIHQSITGLYETRIDLSQLGGD

SEQ ID NO: 56 - protein, 1367 aa, Streptococcus pyogenes
DKKYSIGLDIGTNSVGWAVITDEYKVPSKKFKVLGNTDRHSIKKNLIGALLFDSGETAEATRLKRTARRRYTRRKNRICYLQEIFSNEMAKVDDSFFHRLEESFLVEEDKKHERHPIFGNIVDEVAYHEKYPTIYHLRKKLVDSTDKADLRLIYLALAHMIKFRGHFLIEGDLNPDNSDVDKLFIQLVQTYNQLFEENPINASGVDAKAILSARLSKSRRLENLIAQLPGEKKNGLFGNLIALSLGLTPNFKSNFDLAEDAKLQLSKDTYDDDLDNLLAQIGDQYADLFLAAKNLSDAILLSDILRVNTEITKAPLSASMIKRYDEHHQDLTLLKALVRQQLPEKYKEIFFDQSKNGYAGYIDGGASQEEFYKFIKPILEKMDGTEELLVKLNREDLLRKQRTFDNGSIPHQIHLGELHAILRRQEDFYPFLKDNREKIEKILTFRIPYYVGPLARGNSRFAWMTRKSEETITPWNFEEVVDKGASAQSFIERMTNFDKNLPNEKVLPKHSLLYEYFTVYNELTKVKYVTEGMRKPAFLSGEQKKAIVDLLFKTNRKVTVKQLKEDYFKKIECFDSVEISGVEDRFNASLGTYHDLLKIIKDKDFLDNEENEDILEDIVLTLTLFEDREMIEERLKTYAHLFDDKVMKQLKRRRYTGWGRLSRKLINGIRDKQSGKTILDFLKSDGFANRNFMQLIHDDSLTFKEDIQKAQVSGQGDSLHEHIANLAGSPAIKKGILQTVKVVDELVKVMGRHKPENIVIEMARENQTTQKGQKNSRERMKRIEEGIKELGSQILKEHPVENTQLQNEKLYLYYLQNGRDMYVDQELDINRLSDYDVDHIVPQSFLKDDSIDNKVLTRSDKNXGKSDNVPSEEVVKKMKNYWRQLLNAKLITQRKFDNLTKAERGGLSELDKAGFIKRQLVETRQITKHVAQILDSRMNTKYDENDKLIREVKVITLKSKLVSDFRKDFQFYKVREINNYHHAHDAYLNAVVGTALIKKYPKLESEFVYGDYKVYDVRKMIAKSEQEIGKATAKYFFYSNIMNFFKTEITLANGEIRKRPLIETNGETGEIVWDKGRDFATVRKVLSMPQVNIVKKTEVQTGGFSKESILPKRNSDKLIARKKDWDPKKYGGFDSPTVAYSVLVVAKVEKGKSKKLKSVKELLGITIMERSSFEKNPIDFLEAKGYKEVKKDLIIKLPKYSLFELENGRKRMLASAGELQKGNELALPSKYVNFLYLASHYEKLKGSPEDNEQKQLFVEQHKHYLDEIIEQISEFSKRVILADANLDKVLSAYNKHRDKPIREQAENIIHLFTLTNLGAPAAFKYFDTTIDRKRYTSTKEVLDATLIHQSITGLYETRIDLSQLGGD

SEQ ID NO: 57 - protein, 1367 aa, Streptococcus pyogenes
DKKYSIGLDIGTNSVGWAVITDEYKVPSKKFKVLGNTDRHSIKKNLIGALLFDSGETAEATRLKRTARRRYTRRKNRICYLQEIFSNEMAKVDDSFFHRLEESFLVEEDKKHERHPIFGNIVDEVAYHEKYPTIYHLRKKLVDSTDKADLRLIYLALAHMIKFRGHFLIEGDLNPDNSDVDKLFIQLVQTYNQLFEENPINASGVDAKAILSARLSKSRRLENLIAQLPGEKKNGLFGNLIALSLGLTPNFKSNFDLAEDAKLQLSKDTYDDDLDNLLAQIGDQYADLFLAAKNLSDAILLSDILRVNTEITKAPLSASMIKRYDEHHQDLTLLKALVRQQLPEKYKEIFFDQSKNGYAGYIDGGASQEEFYKFIKPILEKMDGTEELLVKLNREDLLRKQRTFDNGSIPHQIHLGELHAILRRQEDFYPFLKDNREKIEKILTFRIPYYVGPLARGNSRFAWMTRKSEETITPWNFEEVVDKGASAQSFIERMTNFDKNLPNEKVLPKHSLLYEYFTVYNELTKVKYVTEGMRKPAFLSGEQKKAIVDLLFKTNRKVTVKQLKEDYFKKIECFDSVEISGVEDRFNASLGTYHDLLKIIKDKDFLDNEENEDILEDIVLTLTLFEDREMIEERLKTYAHLFDDKVMKQLKRRRYTGWGRLSRKLINGIRDKQSGKTILDFLKSDGFANRNFMQLIHDDSLTFKEDIQKAQVSGQGDSLHEHIANLAGSPAIKKGILQTVKVVDELVKVMGRHKPENIVIEMARENQTTQKGQKNSRERMKRIEEGIKELGSQILKEHPVENTQLQNEKLYLYYLQNGRDMYVDQELDINRLSDYDVDHIVPQSFLKDDSIDNKVLTRSDKNAGKSDNVPSEEVVKKMKNYWRQLLNAKLITQRKFDNLTKAERGGLSELDKAGFIKRQLVETRQITKHVAQILDSRMNTKYDENDKLIREVKVITLKSKLVSDFRKDFQFYKVREINNYHHAHDAYLNAVVGTALIKKYPKLESEFVYGDYKVYDVRKMIAKSEQEIGKATAKYFFYSNIMNFFKTEITLANGEIRKRPLIETNGETGEIVWDKGRDFATVRKVLSMPQVNIVKKTEVQTGGFSKESILPKRNSDKLIARKKDWDPKKYGGFDSPTVAYSVLVVAKVEKGKSKKLKSVKELLGITIMERSSFEKNPIDFLEAKGYKEVKKDLIIKLPKYSLFELENGRKRMLASAGELQKGNELALPSKYVNFLYLASHYEKLKGSPEDNEQKQLFVEQHKHYLDEIIEQISEFSKRVILADANLDKVLSAYNKHRDKPIREQAENIIHLFTLTNLGAPAAFKYFDTTIDRKRYTSTKEVLDATLIHQSITGLYETRIDLSQLGGD

SEQ ID NO: 58 - protein, 1053 aa, Staphylococcus aureus; identical to SEQ ID NO: 28

SEQ ID NO: 59 - protein, 1082 aa, Neisseria meningitidis
MAAFKPNSINYILGLDIGIASVGWAMVEIDEEENPIRLIDLGVRVFERAEVPKTGDSLAMARRLARSVRRLTRRRAHRLLRTRRLLKREGVLQAANFDENGLIKSLPNTPWQLRAAALDRKLTPLEWSAVLLHLIKHRGYLSQRKNEGETADKELGALLKGVAGNAHALQTGDFRTPAELALNKFEKESGHIRNQRSDYSHTFSRKDLQAELILLFEKQKEFGNPHVSGGLKEGIETLLMTQRPALSGDAVQKMLGHCTFEPAEPKAAKNTYTAERFIWLTKLNNLRILEQGSERPLTDTERATLMDEPYRKSKLTYAQARKLLGLEDTAFFKGLRYGKDNAEASTLMEMKAYHAISRALEKEGLKDKKSPLNLSPELQDEIGTAFSLFKTDEDITGRLKDRIQPEILEALLKHISFDKFVQISLKALRRIVPLMEQGKRYDEACAEIYGDHYGKKNTEEKIYLPPIPADEIRNPVVLRALSQARKVINGVVRRYGSPARIHIETAREVGKSFKDRKEIEKRQEENRKDREKAAAKFREYFPNFVGEPKSKDILKLRLYEQQHGKCLYSGKEINLGRLNEKGYVEIDAALPFSRTWDDSFNNKVLVLGSENQNKGNQTPYEYFNGKDNSREWQEFKARVETSRFPRSKKQRILLQKFDEDGFKERNLNDTRYVNRFLCQFVADRMRLTGKGKKRVFASNGQITNLLRGFWGLRKVRAENDRHHALDAVVVACSTVAMQQKITRFVRYKEMNAFDGKTIDKETGEVLHQKTHFPQPWEFFAQEVMIRVFGKPDGKPEFEEADTLEKLRTLLAEKLSSRPEAVHEYVTPLFVSRAPNRKMSGQGHMETVKSAKRLDEGVSVLRVPLTQLKLKDLEKMVNREREPKLYEALKARLEAHKDDPAKAFAEPFYKYDKAGNRTQQVKAVRVEQVQKTGVWVRNHNGIADNATMVRVDVFEKGDKYYLVPIYSWQVAKGILPDRAVVQGKDEEDWQLIDDSFNFKFSLHPNDLVEVITKKARMFGYFASCHRGTGNINIRIHDLDHKIGKNGILEGIGVKTALSFQKYQIDELGKEIRPCRLKKRPPVR

SEQ ID NO: 60 - protein, 984 aa, Campylobacter jejuni
MARILAFDIGISSIGWAFSENDELKDCGVRIFTKVENPKTGESLALPRRLARSARKRLARRKARLNHLKHLIANEFKLNYEDYQSFDESLAKAYKGSLISPYELRFRALNELLSKQDFARVILHIAKRRGYDDIKNSDDKEKGAILKAIKQNEEKLANYQSVGEYLYKEYFQKFKENSKEFTNVRNKKESYERCIAQSFLKDELKLIFKKQREFGFSFSKKFEEEVLSVAFYKRALKDFSHLVGNCSFFTDEKRAPKNSPLAFMFVALTRIINLLNNLKNTEGILYTKDDLNALLNEVLKNGTLTYKQTKKLLGLSDDYEFKGEKGTYFIEFKKYKEFIKALGEHNLSQDDLNEIAKDITLIKDEIKLKKALAKYDLNQNQIDSLSKLEFKDHLNISFKALKLVTPLMLEGKKYDEACNELNLKVAINEDKKDFLPAFNETYYKDEVTNPVVLRAIKEYRKVLNALLKKYGKVHKINIELAREVGKNHSQRAKIEKEQNENYKAKKDAELECEKLGLKINSKNILKLRLFKEQKEFCAYSGEKIKISDLQDEKMLEIDHIYPYSRSFDDSYMNKVLVFTKQNQEKLNQTPFEAFGNDSAKWQKIEVLAKNLPTKKQKRILDKNYKDKEQKNFKDRNLNDTRYIARLVLNYTKDYLDFLPLSDDENTKLNDTQKGSKVHVEAKSGMLTSALRHTWGFSAKDRNNHLHHAIDAVIIAYANNSIVKAFSDFKKEQESNSAELYAKKISELDYKNKRKFFEPFSGFRQKVLDKIDEIFVSKPERKKPSGALHEETFRKEEEFYQSYGGKEGVLKALELGKIRKVNGKIVKNGDMFRVDIFKHKKTNKFYAVPIYTMDFALKVLPNKAVARSKKGEIKDWILMDENYEFCFSLYKDSLILIQTKDMQEPEFVYYNAFTSSTVSLIVSKHDNKFETLSKNQKILFKNANEKEVIAKSIGIQNLKVFEKYIVSALGEVTKAEFRQREDFKK

SEQ ID NO: 61 - protein, 1087 aa, Geobacillus stearothermophilus
MRYKIGLDIGITSVGWAVMNLDIPRIEDLGVRIFDRAENPQTGESLALPRRLARSARRRLRRRKHRLERIRRLVIREGILTKEELDKLFEEKHEIDVWQLRVEALDRKLNNDELARVLLHLAKRRGFKSNRKSERSNKENSTMLKHIEENRAILSSYRTVGEMIVKDPKFALHKRNKGENYTNTIARDDLEREIRLIFSKQREFGNMSCTEEFENEYITIWASQRPVASKDDIEKKVGFCTFEPKEKRAPKATYTFQSFIAWEHINKLRLISPSGARGLTDEERRLLYEQAFQKNKITYHDIRTLLHLPDDTYFKGIVYDRGESRKQNENIRFLELDAYHQIRKAVDKVYGKGKSSSFLPIDFDTFGYALTLFKDDADIHSYLRNEYEQNGKRMPNLANKVYDNELIEELLNLSFTKFGHLSLKALRSILPYMEQGEVYSSACERAGYTFTGPKKKQKTMLLPNIPPIANPVVMRALTQARKVVNAIIKKYGSPVSIHIELARDLSQTFDERRKTKKEQDENRKKNETAIRQLMEYGLTLNPTGHDIVKFKLWSEQNGRCAYSLQPIEIERLLEPGYVEVDHVIPYSRSLDDSYTNKVLVLTRENREKGNRIPAEYLGVGTERWQQFETFVLTNKQFSKKKRDRLLRLHYDENEETEFKNRNLNDTRYISRFFANFIREHLKFAESDDKQKVYTVNGRVTAHLRSRWEFNKNREESDLHHAVDAVIVACTTPSDIAKVTAFYQRREQNKELAKKTEPHFPQPWPHFADELRARLSKHPKESIKALNLGNYDDQKLESLQPVFVSRMPKRSVTGAAHQETLRRYVGIDERSGKIQTVVKTKLSEIKLDASGHFPMYGKESDPRTYEAIRQRLLEHNNDPKKAFQEPLYKPKKNGEPGPVIRTVKIIDTKNQVIPLNDGKTVAYNSNIVRVDVFEKDGKYYCVPVYTMDIMKGILPNKAIEPNKPYSEWKEMTEDYTFRFSLYPNDLIRIELPREKTVKTAAGEEINVKDVFVYYKTIDSANGGLELISHDHRFSLRGVGSRTLKRFEKYQVDVLGNIYKVRGEKRVGLASSAHSKPGKTIRPLQSTRD

SEQ ID NO: 62 - protein, 1228 aa, unidentified
  REGION 1..1228: note = Lachnospiraceae bacterium
MSKLEKFTNCYSLSKTLRFKAIPVGKTQENIDNKRLLVEDEKRAEDYKGVKKLLDRYYLSFINDVLHSIKLKNLNNYISLFRKKTRTEKENKELENLEINLRKEIAKAFKGNEGYKSLFKKDIIETILPEFLDDKDEIALVNSFNGFTTAFTGFFDNRENMFSEEAKSTSIAFRCINENLTRYISNMDIFEKVDAIFDKHEVQEIKEKILNSDYDVEDFFEGEFFNFVLTQEGIDVYNAIIGGFVTESGEKIKGLNEYINLYNQKTKQKLPKFKPLYKQVLSDRESLSFYGEGYTSDEEVLEVFRNTLNKNSEIFSSIKKLEKLFKNFDEYSSAGIFVKNGPAISTISKDIFGEWNVIRDKWNAEYDDIHLKKKAVVTEKYEDDRRKSFKKIGSFSLEQLQEYADADLSVVEKLKEIIIQKVDEIYKVYGSSEKLFDADFVLEKSLKKNDAVVAIMKDLLDSVKSFENYIKAFFGEGKETNRDESFYGDFVLAYDILLKVDHIYDAIRNYVTQKPYSKDKFKLYFQNPQFMGGWDKDKETDYRATILRYGSKYYLAIMDKKYAKCLQKIDKDDVNGNYEKINYKLLPGPNKMLPKVFFSKKWMAYYNPSEDIQKIYKNGTFKKGDMFNLNDCHKLIDFFKDSISRYPKWSNAYDFNFSETEKYKDIAGFYREVEEQGYKVSFESASKKEVDKLVEEGKLYMFQIYNKDFSDKSHGTPNLHTMYFKLLFDENNHGQIRLSGGAELFMRRASLKKEELVVHPANSPIANKNPDNPKKTTTLSYDVYKDKRFSEDQYELHIPIAINKCPKNIFKINTEVRVLLKHDDNPYVIGIDRGERNLLYIVVVDGKGNIVEQYSLNEIINNFNGIRIKTDYHSLLDKKEKERFEARQNWTSIENIKELKAGYISQVVHKICELVEKYDAVIALEDLNSGFKNSRVKVEKQVYQKFEKMLIDKLNYMVDKKSNPCATGGALKGYQITNKFESFKSMSTQNGFIFYIPAWLTSKIDPSTGFVNLLKTKYTSIADSKKFISSFDRIMYVPEEDLFEFALDYKNFSRTDADYIKKWKLYSYGNRIRIFRNPKKNNVFDWEEVCLTSAYKELFNKYGINYQQGDIRALLCEQSDKAFYSSFMALMSLMLQMRNSITGRTDVDFLISPVKNSDGIFYDSRNYEAQENAILPKNADANGAYNIARKVLWAIGQFKKAEDEKLDKVKIAISNKEWLEYAQTSVKH

SEQ ID NO: 63 - protein, 1108 aa, unidentified
  REGION 1..1108: note = Bacillushisashii
MATRSFILKIEPNEEVKKGLWKTHEVLNHGIAYYMNILKLIRQEAIYEHHEQDPKNPKKVSKAEIQAELWDFVLKMQKCNSFTHEVDKDEVFNILRELYEELVPSSVEKKGEANQLSNKFLYPLVDPNSQSGKGTASSGRKPRWYNLKIAGDPSWEEEKKKWEEDKKKDPLAKILGKLAEYGLIPLFIPYTDSNEPIVKEIKWMEKSRNQSVRRLDKDMFIQALERFLSWESWNLKVKEEYEKVEKEYKTLEERIKEDIQALKALEQYEKERQEQLLRDTLNTNEYRLSKRGLRGWREIIQKWLKMDENEPSEKYLEVFKDYQRKHPREAGDYSVYEFLSKKENHFIWRNHPEYPYLYATFCEIDKKKKDAKQQATFTLADPINHPLWVRFEERSGSNLNKYRILTEQLHTEKLKKKLTVQLDRLIYPTESGGWEEKGKVDIVLLPSRQFYNQIFLDIEEKGKHAFTYKDESIKFPLKGTLGGARVQFDRDHLRRYPHKVESGNVGRIYFNMTVNIEPTESPVSKSLKIHRDDFPKVVNFKPKELTEWIKDSKGKKLKSGIESLEIGLRVMSIDLGQRQAAAASIFEVVDQKPDIEGKLFFPIKGTELYAVHRASFNIKLPGETLVKSREVLRKAREDNLKLMNQKLNFLRNVLHFQQFEDITEREKRVTKWISRQENSDVPLVYQDELIQIRELMYKPYKDWVAFLKQLHKRLEVEIGKEVKHWRKSLSDGRKGLYGISLKNIDEIDRTRKFLLRWSLRPTEPGEVRRLEPGQRFAIDQLNHLNALKEDRLKKMANTIIMHALGYCYDVRKKKWQAKNPACQIILFEDLSNYNPYEERSRFENSKLMKWSRREIPRQVALQGEIYGLQVGEVGAQFSSRFHAKTGSPGIRCSVVTKEKLQDNRFFKNLQREGRLTLDKIAVLKEGDLYPDKGGEKFISLSKDRKCVTTHADINAAQNLQKRFWTRTHGFYKVYCKAYQVDGQTVYIPESKDQKQKIIEEFGEGYFILKDGVYEWVNAGKLKIKKGSSKQSSSELVDSDILKDSFDLASELKGEKLMLYRDPSGNVFPSDKWMAAGVFFGKLERILISKLTNQYSISTIEDDSSKQSM

SEQ ID NO: 64 - protein, 1307 aa, unidentified
  REGION 1..1307: note = Acidaminococcus sp. (strain BV3L6)
MTQFEGFTNLYQVSKTLRFELIPQGKTLKHIQEQGFIEEDKARNDHYKELKPIIDRIYKTYADQCLQLVQLDWENLSAAIDSYRKEKTEETRNALIEEQATYRNAIHDYFIGRTDNLTDAINKRHAEIYKGLFKAELFNGKVLKQLGTVTTTEHENALLRSFDKFTTYFSGFYENRKNVFSAEDISTAIPHRIVQDNFPKFKENCHIFTRLITAVPSLREHFENVKKAIGIFVSTSIEEVFSFPFYNQLLTQTQIDLYNQLLGGISREAGTEKIKGLNEVLNLAIQKNDETAHIIASLPHRFIPLFKQILSDRNTLSFILEEFKSDEEVIQSFCKYKTLLRNENVLETAEALFNELNSIDLTHIFISHKKLETISSALCDHWDTLRNALYERRISELTGKITKSAKEKVQRSLKHEDINLQEIISAAGKELSEAFKQKTSEILSHAHAALDQPLPTTLKKQEEKEILKSQLDSLLGLYHLLDWFAVDESNEVDPEFSARLTGIKLEMEPSLSFYNKARNYATKKPYSVEKFKLNFQMPTLASGWDVNKEKNNGAILFVKNGLYYLGIMPKQKGRYKALSFEPTEKTSEGFDKMYYDYFPDAAKMIPKCSTQLKAVTAHFQTHTTPILLSNNFIEPLEITKEIYDLNNPEKEPKKFQTAYAKKTGDQKGYREALCKWIDFTRDFLSKYTKTTSIDLSSLRPSSQYKDLGEYYAELNPLLYHISFQRIAEKEIMDAVETGKLYLFQIYNKDFAKGHHGKPNLHTLYWTGLFSPENLAKTSIKLNGQAELFYRPKSRMKRMAHRLGEKMLNKKLKDQKTPIPDTLYQELYDYVNHRLSHDLSDEARALLPNVITKEVSHEIIKDRRFTSDKFFFHVPITLNYQAANSPSKFNQRVNAYLKEHPETPIIGIDRGERNLIYITVIDSTGKILEQRSLNTIQQFDYQKKLDNREKERVAARQAWSVVGTIKDLKQGYLSQVIHEIVDLMIHYQAVVVLENLNFGFKSKRTGIAEKAVYQQFEKMLIDKLNCLVLKDYPAEKVGGVLNPYQLTDQFTSFAKMGTQSGFLFYVPAPYTSKIDPLTGFVDPFVWKTIKNHESRKHFLEGFDFLHYDVKTGDFILHFKMNRNLSFQRGLPGFMPAWDIVFEKNETQFDAKGTPFIAGKRIVPVIENHRFTGRYRDLYPANELIALLEEKGIVFRDGSNILPKLLENDDSHAIDTMVALIRSVLQMRNSNAATGEDYINSPVRDLNGVCFDSRFQNPEWPMDADANGAYHIALKGQLLLNHLKESKDLKLQNGISNQDWLAYIQELRN

SEQ ID NO: 65 - protein, 1307 aa, synthetic construct
  REGION 1..1307: note = Synthetic
MTQFEGFTNLYQVSKTLRFELIPQGKTLKHIQEQGFIEEDKARNDHYKELKPIIDRIYKTYADQCLQLVQLDWENLSAAIDSYRKEKTEETRNALIEEQATYRNAIHDYFIGRTDNLTDAINKRHAEIYKGLFKAELFNGKVLKQLGTVTTTEHENALLRSFDKFTTYFSGFYENRKNVFSAEDISTAIPHRIVQDNFPKFKENCHIFTRLITAVPSLREHFENVKKAIGIFVSTSIEEVFSFPFYNQLLTQTQIDLYNQLLGGISREAGTEKIKGLNEVLNLAIQKNDETAHIIASLPHRFIPLFKQILSDRNTLSFILEEFKSDEEVIQSFCKYKTLLRNENVLETAEALFNELNSIDLTHIFISHKKLETISSALCDHWDTLRNALYERRISELTGKITKSAKEKVQRSLKHEDINLQEIISAAGKELSEAFKQKTSEILSHAHAALDQPLPTTLKKQEEKEILKSQLDSLLGLYHLLDWFAVDESNEVDPEFSARLTGIKLEMEPSLSFYNKARNYATKKPYSVEKFKLNFQMPTLASGWDVNKEKNNGAILFVKNGLYYLGIMPKQKGRYKALSFEPTEKTSEGFDKMYYDYFPDAAKMIPKCSTQLKAVTAHFQTHTTPILLSNNFIEPLEITKEIYDLNNPEKEPKKFQTAYAKKTGDQKGYREALCKWIDFTRDFLSKYTKTTSIDLSSLRPSSQYKDLGEYYAELNPLLYHISFQRIAEKEIMDAVETGKLYLFQIYNKDFAKGHHGKPNLHTLYWTGLFSPENLAKTSIKLNGQAELFYRPKSRMKRMAHRLGEKMLNKKLKDQKTPIPDTLYQELYDYVNHRLSHDLSDEARALLPNVITKEVSHEIIKDRRFTSDKFFFHVPITLNYQAANSPSKFNQRVNAYLKEHPETPIIGIDRGERNLIYITVIDSTGKILEQRSLNTIQQFDYQKKLDNREKERVAARQAWSVVGTIKDLKQGYLSQVIHEIVDLMIHYQAVVVLENLNFGFKSKRTGIAEKAVYQQFEKMLIDKLNCLVLKDYPAEKVGGVLNPYQLTDQFTSFAKMGTQSGFLFYVPAPYTSKIDPLTGFVDPFVWKTIKNHESRKHFLEGFDFLHYDVKTGDFILHFKMNRNLSFQRGLPGFMPAWDIVFEKNETQFDAKGTPFIAGKRIVPVIENHRFTGRYRDLYPANELIALLEEKGIVFRDGSNILPKLLENDDSHAIDTMVALIRSVLQMANSNAATGEDYINSPVRDLNGVCFDSRFQNPEWPMDADANGAYHIALKGQLLLNHLKESKDLKLQNGISNQDWLAYIQELRN

SEQ ID NO: 66 - protein, 1259 aa, unidentified
  REGION 1..1259: note = Lachnospiraceae bacterium GAM79
MNYKTGLEDFIGKESLSKTLRNALIPTESTKIHMEEMGVIRDDELRAEKQQELKEIMDDYYRTFIEEKLGQIQGIQWNSLFQKMEETMEDISVRKDLDKIQNEKRKEICCYFTSDKRFKDLFNAKLITDILPNFIKDNKEYTEEEKAEKEQTRVLFQRFATAFTNYFNQRRNNFSEDNISTAISFRIVNENSEIHLQNMRAFQRIEQQYPEEVCGMEEEYKDMLQEWQMKHIYSVDFYDRELTQPGIEYYNGICGKINEHMNQFCQKNRINKNDFRMKKLHKQILCKKSSYYEIPFRFESDQEVYDALNEFIKTMKKKEIIRRCVHLGQECDDYDLGKIYISSNKYEQISNALYGSWDTIRKCIKEEYMDALPGKGEKKEEKAEAAAKKEEYRSIADIDKIISLYGSEMDRTISAKKCITEICDMAGQISIDPLVCNSDIKLLQNKEKTTEIKTILDSFLHVYQWGQTFIVSDIIEKDSYFYSELEDVLEDFEGITTLYNHVRSYVTQKPYSTVKFKLHFGSPTLANGWSQSKEYDNNAILLMRDQKFYLGIFNVRNKPDKQIIKGHEKEEKGDYKKMIYNLLPGPSKMLPKVFITSRSGQETYKPSKHILDGYNEKRHIKSSPKFDLGYCWDLIDYYKECIHKHPDWKNYDFHFSDTKDYEDISGFYREVEMQGYQIKWTYISADEIQKLDEKGQIFLFQIYNKDFSVHSTGKDNLHTMYLKNLFSEENLKDIVLKLNGEAELFFRKASIKTPIVHKKGSVLVNRSYTQTVGNKEIRVSIPEEYYTEIYNYLNHIGKGKLSSEAQRYLDEGKIKSFTATKDIVKNYRYCCDHYFLHLPITINFKAKSDVAVNERTLAYIAKKEDIHIIGIDRGERNLLYISVVDVHGNIREQRSFNIVNGYDYQQKLKDREKSRDAARKNWEEIEKIKELKEGYLSMVIHYIAQLVVKYNAVVAMEDLNYGFKTGRFKVERQVYQKFETMLIEKLHYLVFKDREVCEEGGVLRGYQLTYIPESLKKVGKQCGFIFYVPAGYTSKIDPTTGFVNLFSFKNLTNRESRQDFVGKFDEIRYDRDKKMFEFSFDYNNYIKKGTILASTKWKVYTNGTRLKRIVVNGKYTSQSMEVELTDAMEKMLQRAGIEYHDGKDLKGQIVEKGIEAEIIDIFRLTVQMRNSRSESEDREYDRLISPVLNDKGEFFDTATADKTLPQDADANGAYCIALKGLYEVKQIKENWKENEQFPRNKLVQDNKTWFDFMQKKRYL

SEQ ID NO: 67 - protein, 1306 aa, Prevotella copri
MAKNFEDFKRLYSLSKTLRFEAKPIGATLDNIVKSGLLDEDEHRAASYVKVKKLIDEYHKVFIDRVLDDGCLPLENKGNNNSLAEYYESYVSRAQDEDAKKKFKEIQQNLRSVIAKKLTEDKAYANLFGNKLIESYKDKEDKKKIIDSDLIQFINTAESTQLDSMSQDEAKELVKEFWGFVTYFYGFFDNRKNMYTAEEKSTGIAYRLVNENLPKFIDNIEAFNRAITRPEIQENMGVLYSDFSEYLNVESIQEMFQLDYYNMLLTQKQIDVYNAIIGGKTDDEHDVKIKGINEYINLYNQQHKDDKLPKLKALFKQILSDRNAISWLPEEFNSDQEVLNAIKDCYERLAENVLGDKVLKSLLGSLADYSLDGIFIRNDLQLTDISQKMFGNWGVIQNAIMQNIKRVAPARKHKESEEDYEKRIAGIFKKADSFSISYINDCLNEADPNNAYFVENYFATFGAVNTPTMQRENLFALVQNAYTEVAALLHSDYPTVKHLAQDKANVSKIKALLDAIKSLQHFVKPLLGKGDESDKDERFYGELASLWAELDTVTPLYNMIRNYMTRKPYSQKKIKLNFENPQLLGGWDANKEKDYATIILRRNGLYYLAIMDKDSRKLLGKAMPSDGECYEKMVYKFFKDVTTMIPKCSTQLKDVQAYFKVNTDDYVLNSKAFNKPLTITKEVFDLNNVLYGKYKKFQKGYLTATGDNVGYTHAVNVWIKFCMDFLNSYDSTCIYDFSSLKPESYLSLDAFYQDANLLLYKLSFARASVSYINQLVEEGKMYLFQIYNKDFSEYSKGTPNMHTLYWKALFDERNLADVVYKLNGQAEMFYRKKSIENTHPTHPANHPILNKNKDNKKKESLFDYDLIKDRRYTVDKFMFHVPITMNFKSVGSENINQDVKAYLRHADDMHIIGIDRGERHLLYLVVIDLQGNIKEQYSLNEIVNEYNGNTYHTNYHDLLDVREEERLKARQSWQTIENIKELKEGYLSQVIHKITQLMVRYHAIVVLEDLSKGFMRSRQKVEKQVYQKFEKMLIDKLNYLVDKKTDVSTPGGLLNAYQLTCKSDSSQKLGKQSGFLFYIPAWNTSKIDPVTGFVNLLDTHSLNSKEKIKAFFSKFDAIRYNKDKKWFEFNLDYDKFGKKAEDTRTKWTLCTRGMRIDTFRNKEKNSQWDNQEVDLTTEMKSLLEHYYIDIHGNLKDAISAQTDKAFFTGLLHILKLTLQMRNSITGTETDYLVSPVADENGIFYDSRSCGNQLPENADANGAYNIARKGLMLIEQIKNAEDLNNVKFDISNKAWLNFAQQKPYKNG

SEQ ID NO: 68 - protein, 1142 aa, Eubacterium rectale
MFSAKLISDILPEFVIHNNNYSASEKEEKTQVIKLFSRFATSFKDYFKNRANCFSANDISSSSCHRIVNDNAEIFFSNALVYRRIVKNLSNDDINKISGDMKDSLKEMSLEEIYSYEKYGEFITQEGISFYNDICGKVNLFMNLYCQKNKENKNLYKLRKLHKQILCIADTSYEVPYKFESDEEVYQSVNGFLDNISSKHIVERLRKIGENYNGYNLDKIYIVSKFYESVSQKTYRDWETINTALEIHYNNILPGNGKSKADKVKKAVKNDLQKSITEINELVSNYKLCPDDNIKAETYIHEISHILNNFEAQELKYNPEIHLVESELKASELKNVLDVIMNAFHWCSVFMTEELVDKDNNFYAELEEIYDEIYPVISLYNLVRNYVTQKPYSTKKIKLNFGIPTLADGWSKSKEYSNNAIILMRDNLYYLGIFNAKNKPDKKIIEGNTSENKGDYKKMIYNLLPGPNKMIPKVFLSSKTGVETYKPSAYILEGYKQNKHLKSSKDFDITFCHDLIDYFKNCIAIHPEWKNFGFDFSDTSTYEDISGFYREVELQGYKIDWTYISEKDIDLLQEKGQLYLFQIYNKDFSKKSSGNDNLHTMYLKNLFSEENLKDIVLKLNGEAEIFFRKSSIKNPIIHKKGSILVNRTYEAEEKDQFGNIQIVRKTIPENIYQELYKYFNDKSDKELSDEAAKLKNVVGHHEAATNIVKDYRYTYDKYFLHMPITINFKANKTSFINDRILQYIAKEKDLHVIGIDRGERNLIYVSVIDTCGNIVEQKSFNIVNGYDYQIKLKQQEGARQIARKEWKEIGKIKEIKEGYLSLVIHEISKMVIKYNAIIAMEDLSYGFKKGRFKVERQVYQKFETMLINKLNYLVFKDISITENGGLLKGYQLTYIPDKLKNVGHQCGCIFYVPAAYTSKIDPTTGFVNIFKFKDLTVDAKREFIKKFDSIRYDSDKNLFCFTFDYNNFITQNTVMSKSSWSVYTYGVRIKRRFVNGRFSNESDTIDITKDMEKTLEMTDINWRDGHDLRQDIIDYEIVQHIFEIFKLTVQMRNSLSELEDRDYDRLISPVLNENNIFYDSAKAGDALPKDADANGAYCIALKGLYEIKQITENWKEDGKFSRDKLKISNKDWFDFIQNKRYL

SEQ ID NO: 69 - protein, 1259 aa, unidentified
  REGION 1..1259: note = Clostridium sp. AF34-10BH
MNYKTGLEDFIGKESLSKTLRNALIPTESTKIHMEEMGVIRDDELRAEKQQELKEIMDDYYRAFIEEKLGQIQGIQWNSLFQKMEETMEDISVRKDLDKIQNEKRKEICCYFTSDKRFKDLFNAKLITDILPNFIKDNKEYTEEEKAEKEQTRVLFQRFATAFTNYFNQRRNNFSEDNISTAISFRIVNENSEIHLQNMRAFQRIEQQYPEEVCGMEEEYKDMLQEWQMKHIYLVDFYDRVLTQPGIEYYNGICGKINEHMNQFCQKNRINKNDFRMKKLHKQILCKKSSYYEIPFRFESDQEVYDALNEFIKTMKEKEIICRCVHLGQKCDDYDLGKIYISSNKYEQISNALYGSWDTIRKCIKEEYMDALPGKGEKKEEKAEAAAKKEEYRSIADIDKIISLYGSEMDRTISAKKCITEICDMAGQISTDPLVCNSDIKLLQNKEKTTEIKTILDSFLHVYQWGQTFIVSDIIEKDSYFYSELEDVLEDFEGITTLYNHVRSYVTQKPYSTVKFKLHFGSPTLANGWSQSKEYDNNAILLMRDQKFYLGIFNVRNKPDKQIIKGHEKEEKGDYKKMIYNLLPGPSKMLPKVFITSRSGQETYKPSKHILDGYNEKRHIKSSPKFDLGYCWDLIDYYKECIHKHPDWKNYDFHFSDTKDYEDISGFYREVEMQGYQIKWTYISADEIQKLDEKGQIFLFQIYNKDFSVHSTGKDNLHTMYLKNLFSEENLKDIVLKLNGEAELFFRKASIKTPVVHKKGSVLVNRSYTQTVGDKEIRVSIPEEYYTEIYNYLNHIGRGKLSTEAQRYLEERKIKSFTATKDIVKNYRYCCDHYFLHLPITINFKAKSDIAVNERTLAYIAKKEDIHIIGIDRGERNLLYISVVDVHGNIREQRSFNIVNGYDYQQKLKDREKSRDAARKNWEEIEKIKELKEGYLSMVIHYIAQLVVKYNAVVAMEDLNYGFKTGRFKVERQVYQKFETMLIEKLHYLVFKDREVCEEGGVLRGYQLTYIPESLKKVGKQCGFIFYVPAGYTSKIDPTTGFVNLFSFKNLTNRESRQDFVGKFDEIRYDRDKKMFEFSFDYNNYIKKGTMLASTKWKVYTNGTRLKRIVVNGKYTSQSMEVELTDAMEKMLQRAGIEYHDGKDLKGQIVEKGIEAEIIDIFRLTVQMRNSRSESEDREYDRLISPVLNDKGEFFDTATADKTLPQDADANGAYCIALKGLYEVKQIKENWKENEQFPRNKLVQDNKTWFDFMQKKRYL

SEQ ID NO: 70 - protein, 1108 aa, unidentified; identical to SEQ ID NO: 63
  REGION 1..1108: note = Bacillushisashii

SEQ ID NO: 71 - protein, 1465 aa, Thermomonas hydrothermalis
MSEKTTQRAYTLRLNRASGECAVCQNNSCDCWHDALWATHKAVNRGAKAFGDWLLTLRGGLCHTLVEMEVPAKGNNPPQRPTDQERRDRRVLLALSWLSVEDEHGAPKEFIVATGRDSADDRAKKVEEKLREILEKRDFQEHEIDAWLQDCGPSLKAHIREDAVWVNRRALFDAAVERIKTLTWEEAWDFLEPFFGTQYFAGIGDGKDKDDAEGPARQGEKAKDLVQKAGQWLSARFGIGTGADFMSMAEAYEKIAKWASQAQNGDNGKATIEKLACALRPSEPPTLDTVLKCISGPGHKSATREYLKTLDKKSTVTQEDLNQLRKLADEDARNCRKKVGKKGKKPWADEVLKDVENSCELTYLQDNSPARHREFSVMLDHAARRVSMAHSWIKKAEQRRRQFESDAQKLKNLQERAPSAVEWLDRFCESRSMTTGANTGSGYRIRKRAIEGWSYVVQAWAEASCDTEDKRIAAARKVQADPEIEKFGDIQLFEALAADEAICVWRDQEGTQNPSILIDYVTGKTAEHNQKRFKVPAYRHPDELRHPVFCDFGNSRWSIQFAIHKEIRDRDKGAKQDTRQLQNRHGLKMRLWNGRSMTDVNLHWSSKRLTADLALDQNPNPNPTEVTRADRLGRAASSAFDHVKIKNVFNEKEWNGRLQAPRAELDRIAKLEEQGKTEQAEKLRKRLRWYVSFSPCLSPSGPFIVYAGQHNIQPKRSGQYAPHAQANKGRARLAQLILSRLPDLRILSVDLGHRFAAACAVWETLSSDAFRREIQGLNVLAGGSGEGDLFLHVEMTGDDGKRRTVVYRRIGPDQLLDNTPHPAPWARLDRQFLIKLQGEDEGVREASNEELWTVHKLEVEVGRTVPLIDRMVRSGFGKTEKQKERLKKLRELGWISAMPNEPSAETDEKEGEIRSISRSVDELMSSALGTLRLALKRHGNRARIAFAMTADYKPMPGGQKYYFHEAKEASKNDDETKRRDNQIEFLQDALSLWHDLFSSPDWEDNEAKKLWQNHIATLPNYQTPEEISAELKRVERNKKRKENRDKLRTAAKALAENDQLRQHLHDTWKERWESDDQQWKERLRSLKDWIFPRGKAEDNPSIRHVGGLSITRINTISGLYQILKAFKMRPEPDDLRKNIPQKGDDELENFNRRLLEARDRLREQRVKQLASRIIEAALGVGRIKIPKNGKLPKRPRTTVDTPCHAVVIESLKTYRPDDLRTRRENRQLMQWSSAKVRKYLKEGCELYGLHFLEVPANYTSRQCSRTGLPGIRCDDVPTGDFLKAPWWRRAINTAREKNGGDAKDRFLVDLYDHLNNLQSKGEALPATVRVPRQGGNLFIAGAQLDDTNKERRAIQADLNAAANIGLRALLDPDWRGRWWYVPCKDGTSEPALDRIEGSTAFNDVRSLPTGDNSSRRAPREIENLWRDPSGDSLESGTWSPTRAYWDTVQSRVIELLRRHAGLPTS

SEQ ID NO: 72 - protein, 1090 aa, Laceyella sacchari
MSIRSFKLKLKTKSGVNAEQLRRGLWRTHQLINDGIAYYMNWLVLLRQEDLFIRNKETNEIEKRSKEEIQAVLLERVHKQQQRNQWSGEVDEQTLLQALRQLYEEIVPSVIGKSGNASLKARFFLGPLVDPNNKTTKDVSKSGPTPKWKKMKDAGDPNWVQEYEKYMAERQTLVRLEEMGLIPLFPMYTDEVGDIHWLPQASGYTRTWDRDMFQQAIERLLSWESWNRRVRERRAQFEKKTHDFASRFSESDVQWMNKLREYEAQQEKSLEENAFAPNEPYALTKKALRGWERVYHSWMRLDSAASEEAYWQEVATCQTAMRGEFGDPAIYQFLAQKENHDIWRGYPERVIDFAELNHLQRELRRAKEDATFTLPDSVDHPLWVRYEAPGGTNIHGYDLVQDTKRNLTLILDKFILPDENGSWHEVKKVPFSLAKSKQFHRQVWLQEEQKQKKREVVFYDYSTNLPHLGTLAGAKLQWDRNFLNKRTQQQIEETGEIGKVFFNISVDVRPAVEVKNGRLQNGLGKALTVLTHPDGTKIVTGWKAEQLEKWVGESGRVSSLGLDSLSEGLRVMSIDLGQRTSATVSVFEITKEAPDNPYKFFYQLEGTEMFAVHQRSFLLALPGENPPQKIKQMREIRWKERNRIKQQVDQLSAILRLHKKVNEDERIQAIDKLLQKVASWQLNEEIATAWNQALSQLYSKAKENDLQWNQAIKNAHHQLEPVVGKQISLWRKDLSTGRQGIAGLSLWSIEELEATKKLLTRWSKRSREPGVVKRIERFETFAKQIQHHINQVKENRLKQLANLIVMTALGYKYDQEQKKWIEVYPACQVVLFENLRSYRFSFERSRRENKKLMEWSHRSIPKLVQMQGELFGLQVADVYAAYSSRYHGRTGAPGIRCHALTEADLRNETNIIHELIEAGFIKEEHRPYLQQGDLVPWSGGELFATLQKPYDNPRILTLHADINAAQNIQKRFWHPSMWFRVNCESVMEGEIVTYVPKNKTVHKKQGKTFRFVKVEGSDVYEWAKWSKNRNKNTFSSITERKPPSSMILFRDPSGTFFKEQEWVEQKTFWGKVQSMIQAYMKKTIVQRMEE

SEQ ID NO: 73 - protein, 1194 aa, unidentified
  source 1..1194: note = Dsulfonatronum thiodismutans
MVLGRKDDTAELRRALWTTHEHVNLAVAEVERVLLRCRGRSYWTLDRRGDPVHVPESQVAEDALAMAREAQRRNGWPVVGEDEEILLALRYLYEQIVPSCLLDDLGKPLKGDAQKIGTNYAGPLFDSDTCRRDEGKDVACCGPFHEVAGKYLGALPEWATPISKQEFDGKDASHLRFKATGGDDAFFRVSIEKANAWYEDPANQDALKNKAYNKDDWKKEKDKGISSWAVKYIQKQLQLGQDPRTEVRRKLWLELGLLPLFIPVFDKTMVGNLWNRLAVRLALAHLLSWESWNHRAVQDQALARAKRDELAALFLGMEDGFAGLREYELRRNESIKQHAFEPVDRPYVVSGRALRSWTRVREEWLRHGDTQESRKNICNRLQDRLRGKFGDPDVFHWLAEDGQEALWKERDCVTSFSLLNDADGLLEKRKGYALMTFADARLHPRWAMYEAPGGSNLRTYQIRKTENGLWADVVLLSPRNESAAVEEKTFNVRLAPSGQLSNVSFDQIQKGSKMVGRCRYQSANQQFEGLLGGAEILFDRKRIANEQHGATDLASKPGHVWFKLTLDVRPQAPQGWLDGKGRPALPPEAKHFKTALSNKSKFADQVRPGLRVLSVDLGVRSFAACSVFELVRGGPDQGTYFPAADGRTVDDPEKLWAKHERSFKITLPGENPSRKEEIARRAAMEELRSLNGDIRRLKAILRLSVLQEDDPRTEHLRLFMEAIVDDPAKSALNAELFKGFGDDRFRSTPDLWKQHCHFFHDKAEKVVAERFSRWRTETRPKSSSWQDWRERRGYAGGKSYWAVTYLEAVRGLILRWNMRGRTYGEVNRQDKKQFGTVASALLHHINQLKEDRIKTGADMIIQAARGFVPRKNGAGWVQVHEPCRLILFEDLARYRFRTDRSRRENSRLMRWSHREIVNEVGMQGELYGLHVDTTEAGFSSRYLASSGAPGVRCRHLVEEDFHDGLPGMHLVGELDWLLPKDKDRTANEARRLLGGMVRPGMLVPWDGGELFATLNAASQLHVIHADINAAQNLQRRFWGRCGEAIRIVCNQLSVDGSTRYEMAKAPKARLLGALQQLKNGDAPFHLTSIPNSQKPENSYVMTPTNAGKKYRAGPGEKSSGEEDELALDIVEQAEELAQGRKTFFRDPSGVFFAPDRWLPSEIYWSRIRRRIWQVTLERNSSGRQERAEMDEMPY

SEQ ID NO: 74 - protein, 1300 aa, unidentified
  source 1..1300: note = Francisella novicida
MSIYQEFVNKYSLSKTLRFELIPQGKTLENIKARGLILDDEKRAKDYKKAKQIIDKYHQFFIEEILSSVCISEDLLQNYSDVYFKLKKSDDDNLQKDFKSAKDTIKKQISEYIKDSEKFKNLFNQNLIDAKKGQESDLILWLKQSKDNGIELFKANSDITDIDEALEIIKSFKGWTTYFKGFHENRKNVYSSNDIPTSIIYRIVDDNLPKFLENKAKYESLKDKAPEAINYEQIKKDLAEELTFDIDYKTSEVNQRVFSLDEVFEIANFNNYLNQSGITKFNTIIGGKFVNGENTKRKGINEYINLYSQQINDKTLKKYKMSVLFKQILSDTESKSFVIDKLEDDSDVVTTMQSFYEQIAAFKTVEEKSIKETLSLLFDDLKAQKLDLSKIYFKNDKSLTDLSQQVFDDYSVIGTAVLEYITQQIAPKNLDNPSKKEQELIAKKTEKAKYLSLETIKLALEEFNKHRDIDKQCRFEEILANFAAIPMIFDEIAQNKDNLAQISIKYQNQGKKDLLQASAEDDVKAIKDLLDQTNNLLHKLKIFHISQSEDKANILDKDEHFYLVFEECYFELANIVPLYNKIRNYITQKPYSDEKFKLNFENSTLANGWDKNKEPDNTAILFIKDDKYYLGVMNKKNNKIFDDKAIKENKGEGYKKIVYKLLPGANKMLPKVFFSAKSIKFYNPSEDILRIRNHSTHTKNGSPQKGYEKFEFNIEDCRKFIDFYKQSISKHPEWKDFGFRFSDTQRYNSIDEFYREVENQGYKLTFENISESYIDSVVNQGKLYLFQIYNKDFSAYSKGRPNLHTLYWKALFDERNLQDVVYKLNGEAELFYRKQSIPKKITHPAKEAIANKNKDNPKKESVFEYDLIKDKRFTEDKFFFHCPITINFKSSGANKFNDEINLLLKEKANDVHILSIDRGERHLAYYTLVDGKGNIIKQDTFNIIGNDRMKTNYHDKLAAIEKDRDSARKDWKKINNIKEMKEGYLSQVVHEIAKLVIEYNAIVVFEDLNFGFKRGRFKVEKQVYQKLEKMLIEKLNYLVFKDNEFDKTGGVLRAYQLTAPFETFKKMGKQTGIIYYVPAGFTSKICPVTGFVNQLYPKYESVSKSQEFFSKFDKICYNLDKGYFEFSFDYKNFGDKAAKGKWTIASFGSRLINFRNSDKNHNWDTREVYPTKELEKLLKDYSIEYGHGECIKAAICGESDKKFFAKLTSVLNTILQMRNSKTGTELDYLISPVADVNGNFFDSRQAPKNMPQDADANGAYHIGLKGLMLLGRIKNNQEGKKLNLVIKNEEYFEFVQNRNN

SEQ ID NO: 75 - protein, 1082 aa, Geobacillus thermodenitrificans; identical to SEQ ID NO: 38

SEQ ID NO: 76 - protein, 887 aa, Natronobacterium gregoryi
MTVIDLDSTTTADELTSGHTYDISVTLTGVYDNTDEQHPRMSLAFEQDNGERRYITLWKNTTPKDVFTYDYATGSTYIFTNIDYEVKDGYENLTATYQTTVENATAQEVGTTDEDETFAGGEPLDHHLDDALNETPDDAETESDSGHVMTSFASRDQLPEWTLHTYTLTATDGAKTDTEYARRTLAYTVRQELYTDHDAAPVATDGLMLLTPEPLGETPLDLDCGVRVEADETRTLDYTTAKDRLLARELVEEGLKRSLWDDYLVRGIDEVLSKEPVLTCDEFDLHERYDLSVEVGHSGRAYLHINFRHRFVPKLTLADIDDDNIYPGLRVKTTYRPRRGHIVWGLRDECATDSLNTLGNQSVVAYHRNNQTPINTDLLDAIEAADRRVVETRRQGHGDDAVSFPQELLAVEPNTHQIKQFASDGFHQQARSKTRLSASRCSEKAQAFAERLDPVRLNGSTVEFSSEFFTGNNEQQLRLLYENGESVLTFRDGARGAHPDETFSKGIVNPPESFEVAVVLPEQQADTCKAQWDTMADLLNQAGAPPTRSETVQYDAFSSPESISLNVAGAIDPSEVDAAFVVLPPDQEGFADLASPTETYDELKKALANMGIYSQMAYFDRFRDAKIFYTRNVALGLLAAAGGVAFTTEHAMPGDADMFIGIDVSRSYPEDGASGQINIAATATAVYKDGTILGHSSTRPQLGEKLQSTDVRDIMKNAILGYQQVTGESPTHIVIHRDGFMNEDLDPATEFLNEQGVEYDIVEIRKQPQTRLLAVSDVQYDTPVKSIAAINQNEPRATVATFGAPEYLATRDGGGLPRPIQIERVAGETDIETLTRQVYLLSQSHIQVHNSTARLPITTAYADQASTHATKGYLVQTGAFESNVGFL

SEQ ID NO: 77 - protein, 1387 aa, synthetic construct
  REGION 1..1387: note = Synthetic
DYKVYDVRKMIAKSEQEIGKATAKYFFYSNIMNFFKTEITLANGEIRKRPLIETNGETGEIVWDKGRDFATVRKVLSMPQVNIVKKTEVQTGGFSKESILPKRNSDKLIARKKDWDPKKYGGFDSPTVAYSVLVVAKVEKGKSKKLKSVKELLGITIMERSSFEKNPIDFLEAKGYKEVKKDLIIKLPKYSLFELENGRKRMLASAGELQKGNELALPSKYVNFLYLASHYEKLKGSPEDNEQKQLFVEQHKHYLDEIIEQISEFSKRVILADANLDKVLSAYNKHRDKPIREQAENIIHLFTLTNLGAPAAFKYFDTTIDRKRYTSTKEVLDATLIHQSITGLYETRIDLSQLGGDGGSGGSGGSGGSGGSGGSGGDKKYSIGLAIGTNSVGWAVITDEYKVPSKKFKVLGNTDRHSIKKNLIGALLFDSGETAEATRLKRTARRRYTRRKNRICYLQEIFSNEMAKVDDSFFHRLEESFLVEEDKKHERHPIFGNIVDEVAYHEKYPTIYHLRKKLVDSTDKADLRLIYLALAHMIKFRGHFLIEGDLNPDNSDVDKLFIQLVQTYNQLFEENPINASGVDAKAILSARLSKSRRLENLIAQLPGEKKNGLFGNLIALSLGLTPNFKSNFDLAEDAKLQLSKDTYDDDLDNLLAQIGDQYADLFLAAKNLSDAILLSDILRVNTEITKAPLSASMIKRYDEHHQDLTLLKALVRQQLPEKYKEIFFDQSKNGYAGYIDGGASQEEFYKFIKPILEKMDGTEELLVKLNREDLLRKQRTFDNGSIPHQIHLGELHAILRRQEDFYPFLKDNREKIEKILTFRIPYYVGPLARGNSRFAWMTRKSEETITPWNFEEVVDKGASAQSFIERMTNFDKNLPNEKVLPKHSLLYEYFTVYNELTKVKYVTEGMRKPAFLSGEQKKAIVDLLFKTNRKVTVKQLKEDYFKKIECFDSVEISGVEDRFNASLGTYHDLLKIIKDKDFLDNEENEDILEDIVLTLTLFEDREMIEERLKTYAHLFDDKVMKQLKRRRYTGWGRLSRKLINGIRDKQSGKTILDFLKSDGFANRNFMQLIHDDSLTFKEDIQKAQVSGQGDSLHEHIANLAGSPAIKKGILQTVKVVDELVKVMGRHKPENIVIEMARENQTTQKGQKNSRERMKRIEEGIKELGSQILKEHPVENTQLQNEKLYLYYLQNGRDMYVDQELDINRLSDYDVDHIVPQSFLKDDSIDNKVLTRSDKNRGKSDNVPSEEVVKKMKNYWRQLLNAKLITQRKFDNLTKAERGGLSELDKAGFIKRQLVETRQITKHVAQILDSRMNTKYDENDKLIREVKVITLKSKLVSDFRKDFQFYKVREINNYHHAHDAYLNAVVGTALIKKYPKLESEFVYG

SEQ ID NO: 78 - protein, 1388 aa, synthetic construct
  REGION 1..1388: note = Synthetic
EIGKATAKYFFYSNIMNFFKTEITLANGEIRKRPLIETNGETGEIVWDKGRDFATVRKVLSMPQVNIVKKTEVQTGGFSKESILPKRNSDKLIARKKDWDPKKYGGFDSPTVAYSVLVVAKVEKGKSKKLKSVKELLGITIMERSSFEKNPIDFLEAKGYKEVKKDLIIKLPKYSLFELENGRKRMLASAGELQKGNELALPSKYVNFLYLASHYEKLKGSPEDNEQKQLFVEQHKHYLDEIIEQISEFSKRVILADANLDKVLSAYNKHRDKPIREQAENIIHLFTLTNLGAPAAFKYFDTTIDRKRYTSTKEVLDATLIHQSITGLYETRIDLSQLGGDGGSGGSGGSGGSGGSGGSGGMDKKYSIGLAIGTNSVGWAVITDEYKVPSKKFKVLGNTDRHSIKKNLIGALLFDSGETAEATRLKRTARRRYTRRKNRICYLQEIFSNEMAKVDDSFFHRLEESFLVEEDKKHERHPIFGNIVDEVAYHEKYPTIYHLRKKLVDSTDKADLRLIYLALAHMIKFRGHFLIEGDLNPDNSDVDKLFIQLVQTYNQLFEENPINASGVDAKAILSARLSKSRRLENLIAQLPGEKKNGLFGNLIALSLGLTPNFKSNFDLAEDAKLQLSKDTYDDDLDNLLAQIGDQYADLFLAAKNLSDAILLSDILRVNTEITKAPLSASMIKRYDEHHQDLTLLKALVRQQLPEKYKEIFFDQSKNGYAGYIDGGASQEEFYKFIKPILEKMDGTEELLVKLNREDLLRKQRTFDNGSIPHQIHLGELHAILRRQEDFYPFLKDNREKIEKILTFRIPYYVGPLARGNSRFAWMTRKSEETITPWNFEEVVDKGASAQSFIERMTNFDKNLPNEKVLPKHSLLYEYFTVYNELTKVKYVTEGMRKPAFLSGEQKKAIVDLLFKTNRKVTVKQLKEDYFKKIECFDSVEISGVEDRFNASLGTYHDLLKIIKDKDFLDNEENEDILEDIVLTLTLFEDREMIEERLKTYAHLFDDKVMKQLKRRRYTGWGRLSRKLINGIRDKQSGKTILDFLKSDGFANRNFMQLIHDDSLTFKEDIQKAQVSGQGDSLHEHIANLAGSPAIKKGILQTVKVVDELVKVMGRHKPENIVIEMARENQTTQKGQKNSRERMKRIEEGIKELGSQILKEHPVENTQLQNEKLYLYYLQNGRDMYVDQELDINRLSDYDVDHIVPQSFLKDDSIDNKVLTRSDKNRGKSDNVPSEEVVKKMKNYWRQLLNAKLITQRKFDNLTKAERGGLSELDKAGFIKRQLVETRQITKHVAQILDSRMNTKYDENDKLIREVKVITLKSKLVSDFRKDFQFYKVREINNYHHAHDAYLNAVVGTALIKKYPKLESEFVYGDYKVYDVRKMIAKSEQ

SEQ ID NO: 79 - protein, 1387 aa, synthetic construct
  REGION 1..1387: note = Synthetic
NIMNFFKTEITLANGEIRKRPLIETNGETGEIVWDKGRDFATVRKVLSMPQVNIVKKTEVQTGGFSKESILPKRNSDKLIARKKDWDPKKYGGFDSPTVAYSVLVVAKVEKGKSKKLKSVKELLGITIMERSSFEKNPIDFLEAKGYKEVKKDLIIKLPKYSLFELENGRKRMLASAGELQKGNELALPSKYVNFLYLASHYEKLKGSPEDNEQKQLFVEQHKHYLDEIIEQISEFSKRVILADANLDKVLSAYNKHRDKPIREQAENIIHLFTLTNLGAPAAFKYFDTTIDRKRYTSTKEVLDATLIHQSITGLYETRIDLSQLGGDGGSGGSGGSGGSGGSGGSGGDKKYSIGLAIGTNSVGWAVITDEYKVPSKKFKVLGNTDRHSIKKNLIGALLFDSGETAEATRLKRTARRRYTRRKNRICYLQEIFSNEMAKVDDSFFHRLEESFLVEEDKKHERHPIFGNIVDEVAYHEKYPTIYHLRKKLVDSTDKADLRLIYLALAHMIKFRGHFLIEGDLNPDNSDVDKLFIQLVQTYNQLFEENPINASGVDAKAILSARLSKSRRLENLIAQLPGEKKNGLFGNLIALSLGLTPNFKSNFDLAEDAKLQLSKDTYDDDLDNLLAQIGDQYADLFLAAKNLSDAILLSDILRVNTEITKAPLSASMIKRYDEHHQDLTLLKALVRQQLPEKYKEIFFDQSKNGYAGYIDGGASQEEFYKFIKPILEKMDGTEELLVKLNREDLLRKQRTFDNGSIPHQIHLGELHAILRRQEDFYPFLKDNREKIEKILTFRIPYYVGPLARGNSRFAWMTRKSEETITPWNFEEVVDKGASAQSFIERMTNFDKNLPNEKVLPKHSLLYEYFTVYNELTKVKYVTEGMRKPAFLSGEQKKAIVDLLFKTNRKVTVKQLKEDYFKKIECFDSVEISGVEDRFNASLGTYHDLLKIIKDKDFLDNEENEDILEDIVLTLTLFEDREMIEERLKTYAHLFDDKVMKQLKRRRYTGWGRLSRKLINGIRDKQSGKTILDFLKSDGFANRNFMQLIHDDSLTFKEDIQKAQVSGQGDSLHEHIANLAGSPAIKKGILQTVKVVDELVKVMGRHKPENIVIEMARENQTTQKGQKNSRERMKRIEEGIKELGSQILKEHPVENTQLQNEKLYLYYLQNGRDMYVDQELDINRLSDYDVDHIVPQSFLKDDSIDNKVLTRSDKNRGKSDNVPSEEVVKKMKNYWRQLLNAKLITQRKFDNLTKAERGGLSELDKAGFIKRQLVETRQITKHVAQILDSRMNTKYDENDKLIREVKVITLKSKLVSDFRKDFQFYKVREINNYHHAHDAYLNAVVGTALIKKYPKLESEFVYGDYKVYDVRKMIAKSEQEIGKATAKYFFYS

SEQ ID NO: 80 - protein, 1388 aa, synthetic construct
  REGION 1..1388: note = Synthetic
PEDNEQKQLFVEQHKHYLDEIIEQISEFSKRVILADANLDKVLSAYNKHRDKPIREQAENIIHLFTLTNLGAPAAFKYFDTTIDRKRYTSTKEVLDATLIHQSITGLYETRIDLSQLGGDGGSGGSGGSGGSGGSGGSGGMDKKYSIGLAIGTNSVGWAVITDEYKVPSKKFKVLGNTDRHSIKKNLIGALLFDSGETAEATRLKRTARRRYTRRKNRICYLQEIFSNEMAKVDDSFFHRLEESFLVEEDKKHERHPIFGNIVDEVAYHEKYPTIYHLRKKLVDSTDKADLRLIYLALAHMIKFRGHFLIEGDLNPDNSDVDKLFIQLVQTYNQLFEENPINASGVDAKAILSARLSKSRRLENLIAQLPGEKKNGLFGNLIALSLGLTPNFKSNFDLAEDAKLQLSKDTYDDDLDNLLAQIGDQYADLFLAAKNLSDAILLSDILRVNTEITKAPLSASMIKRYDEHHQDLTLLKALVRQQLPEKYKEIFFDQSKNGYAGYIDGGASQEEFYKFIKPILEKMDGTEELLVKLNREDLLRKQRTFDNGSIPHQIHLGELHAILRRQEDFYPFLKDNREKIEKILTFRIPYYVGPLARGNSRFAWMTRKSEETITPWNFEEVVDKGASAQSFIERMTNFDKNLPNEKVLPKHSLLYEYFTVYNELTKVKYVTEGMRKPAFLSGEQKKAIVDLLFKTNRKVTVKQLKEDYFKKIECFDSVEISGVEDRFNASLGTYHDLLKIIKDKDFLDNEENEDILEDIVLTLTLFEDREMIEERLKTYAHLFDDKVMKQLKRRRYTGWGRLSRKLINGIRDKQSGKTILDFLKSDGFANRNFMQLIHDDSLTFKEDIQKAQVSGQGDSLHEHIANLAGSPAIKKGILQTVKVVDELVKVMGRHKPENIVIEMARENQTTQKGQKNSRERMKRIEEGIKELGSQILKEHPVENTQLQNEKLYLYYLQNGRDMYVDQELDINRLSDYDVDHIVPQSFLKDDSIDNKVLTRSDKNRGKSDNVPSEEVVKKMKNYWRQLLNAKLITQRKFDNLTKAERGGLSELDKAGFIKRQLVETRQITKHVAQILDSRMNTKYDENDKLIREVKVITLKSKLVSDFRKDFQFYKVREINNYHHAHDAYLNAVVGTALIKKYPKLESEFVYGDYKVYDVRKMIAKSEQEIGKATAKYFFYSNIMNFFKTEITLANGEIRKRPLIETNGETGEIVWDKGRDFATVRKVLSMPQVNIVKKTEVQTGGFSKESILPKRNSDKLIARKKDWDPKKYGGFDSPTVAYSVLVVAKVEKGKSKKLKSVKELLGITIMERSSFEKNPIDFLEAKGYKEVKKDLIIKLPKYSLFELENGRKRMLASAGELQKGNELALPSKYVNFLYLASHYEKLKGS

SEQ ID NO: 81 - protein, 1387 aa, synthetic construct
  REGION 1..1387: note = Synthetic
KPIREQAENIIHLFTLTNLGAPAAFKYFDTTIDRKRYTSTKEVLDATLIHQSITGLYETRIDLSQLGGDGGSGGSGGSGGSGGSGGSGGDKKYSIGLAIGTNSVGWAVITDEYKVPSKKFKVLGNTDRHSIKKNLIGALLFDSGETAEATRLKRTARRRYTRRKNRICYLQEIFSNEMAKVDDSFFHRLEESFLVEEDKKHERHPIFGNIVDEVAYHEKYPTIYHLRKKLVDSTDKADLRLIYLALAHMIKFRGHFLIEGDLNPDNSDVDKLFIQLVQTYNQLFEENPINASGVDAKAILSARLSKSRRLENLIAQLPGEKKNGLFGNLIALSLGLTPNFKSNFDLAEDAKLQLSKDTYDDDLDNLLAQIGDQYADLFLAAKNLSDAILLSDILRVNTEITKAPLSASMIKRYDEHHQDLTLLKALVRQQLPEKYKEIFFDQSKNGYAGYIDGGASQEEFYKFIKPILEKMDGTEELLVKLNREDLLRKQRTFDNGSIPHQIHLGELHAILRRQEDFYPFLKDNREKIEKILTFRIPYYVGPLARGNSRFAWMTRKSEETITPWNFEEVVDKGASAQSFIERMTNFDKNLPNEKVLPKHSLLYEYFTVYNELTKVKYVTEGMRKPAFLSGEQKKAIVDLLFKTNRKVTVKQLKEDYFKKIECFDSVEISGVEDRFNASLGTYHDLLKIIKDKDFLDNEENEDILEDIVLTLTLFEDREMIEERLKTYAHLFDDKVMKQLKRRRYTGWGRLSRKLINGIRDKQSGKTILDFLKSDGFANRNFMQLIHDDSLTFKEDIQKAQVSGQGDSLHEHIANLAGSPAIKKGILQTVKVVDELVKVMGRHKPENIVIEMARENQTTQKGQKNSRERMKRIEEGIKELGSQILKEHPVENTQLQNEKLYLYYLQNGRDMYVDQELDINRLSDYDVDHIVPQSFLKDDSIDNKVLTRSDKNRGKSDNVPSEEVVKKMKNYWRQLLNAKLITQRKFDNLTKAERGGLSELDKAGFIKRQLVETRQITKHVAQILDSRMNTKYDENDKLIREVKVITLKSKLVSDFRKDFQFYKVREINNYHHAHDAYLNAVVGTALIKKYPKLESEFVYGDYKVYDVRKMIAKSEQEIGKATAKYFFYSNIMNFFKTEITLANGEIRKRPLIETNGETGEIVWDKGRDFATVRKVLSMPQVNIVKKTEVQTGGFSKESILPKRNSDKLIARKKDWDPKKYGGFDSPTVAYSVLVVAKVEKGKSKKLKSVKELLGITIMERSSFEKNPIDFLEAKGYKEVKKDLIIKLPKYSLFELENGRKRMLASAGELQKGNELALPSKYVNFLYLASHYEKLKGSPEDNEQKQLFVEQHKHYLDEIIEQISEFSKRVILADANLDKVLSAYNKHRD

SEQ ID NO: 82 - protein, 357 aa, synthetic construct
  REGION 1..357: note = Synthetic
DYKVYDVRKMIAKSEQEIGKATAKYFFYSNIMNFFKTEITLANGEIRKRPLIETNGETGEIVWDKGRDFATVRKVLSMPQVNIVKKTEVQTGGFSKESILPKRNSDKLIARKKDWDPKKYGGFDSPTVAYSVLVVAKVEKGKSKKLKSVKELLGITIMERSSFEKNPIDFLEAKGYKEVKKDLIIKLPKYSLFELENGRKRMLASAGELQKGNELALPSKYVNFLYLASHYEKLKGSPEDNEQKQLFVEQHKHYLDEIIEQISEFSKRVILADANLDKVLSAYNKHRDKPIREQAENIIHLFTLTNLGAPAAFKYFDTTIDRKRYTSTKEVLDATLIHQSITGLYETRIDLSQLGGD

SEQ ID NO: 83 - protein, 341 aa, synthetic construct
  REGION 1..341: note = Synthetic
EIGKATAKYFFYSNIMNFFKTEITLANGEIRKRPLIETNGETGEIVWDKGRDFATVRKVLSMPQVNIVKKTEVQTGGFSKESILPKRNSDKLIARKKDWDPKKYGGFDSPTVAYSVLVVAKVEKGKSKKLKSVKELLGITIMERSSFEKNPIDFLEAKGYKEVKKDLIIKLPKYSLFELENGRKRMLASAGELQKGNELALPSKYVNFLYLASHYEKLKGSPEDNEQKQLFVEQHKHYLDEIIEQISEFSKRVILADANLDKVLSAYNKHRDKPIREQAENIIHLFTLTNLGAPAAFKYFDTTIDRKRYTSTKEVLDATLIHQSITGLYETRIDLSQLGGD

SEQ ID NO: 84 - protein, 328 aa, synthetic construct
  REGION 1..328: note = Synthetic
NIMNFFKTEITLANGEIRKRPLIETNGETGEIVWDKGRDFATVRKVLSMPQVNIVKKTEVQTGGFSKESILPKRNSDKLIARKKDWDPKKYGGFDSPTVAYSVLVVAKVEKGKSKKLKSVKELLGITIMERSSFEKNPIDFLEAKGYKEVKKDLIIKLPKYSLFELENGRKRMLASAGELQKGNELALPSKYVNFLYLASHYEKLKGSPEDNEQKQLFVEQHKHYLDEIIEQISEFSKRVILADANLDKVLSAYNKHRDKPIREQAENIIHLFTLTNLGAPAAFKYFDTTIDRKRYTSTKEVLDATLIHQSITGLYETRIDLSQLGGD

SEQ ID NO: 85 - protein, 120 aa, synthetic construct
  REGION 1..120: note = Synthetic
PEDNEQKQLFVEQHKHYLDEIIEQISEFSKRVILADANLDKVLSAYNKHRDKPIREQAENIIHLFTLTNLGAPAAFKYFDTTIDRKRYTSTKEVLDATLIHQSITGLYETRIDLSQLGGD

SEQ ID NO: 86 - protein, 69 aa, synthetic construct
  REGION 1..69: note = Synthetic
KPIREQAENIIHLFTLTNLGAPAAFKYFDTTIDRKRYTSTKEVLDATLIHQSITGLYETRIDLSQLGGD

SEQ ID NO: 87 - protein, 1367 aa, synthetic construct
  REGION 1..1367: note = Synthetic
DKKYSIGLDIGTNSVGWAVITDEYKVPSKKFKVLGNTDRHSIKKNLIGALLFDSGETAEATRLKRTARRRYTRRKNRICYLQEIFSNEMAKVDDSFFHRLEESFLVEEDKKHERHPIFGNIVDEVAYHEKYPTIYHLRKKLVDSTDKADLRLIYLALAHMIKFRGHFLIEGDLNPDNSDVDKLFIQLVQTYNQLFEENPINASGVDAKAILSARLSKSRRLENLIAQLPGEKKNGLFGNLIALSLGLTPNFKSNFDLAEDAKLQLSKDTYDDDLDNLLAQIGDQYADLFLAAKNLSDAILLSDILRVNTEITKAPLSASMIKRYDEHHQDLTLLKALVRQQLPEKYKEIFFDQSKNGYAGYIDGGASQEEFYKFIKPILEKMDGTEELLVKLNREDLLRKQRTFDNGSIPHQIHLGELHAILRRQEDFYPFLKDNREKIEKILTFRIPYYVGPLARGNSRFAWMTRKSEETITPWNFEEVVDKGASAQSFIERMTNFDKNLPNEKVLPKHSLLYEYFTVYNELTKVKYVTEGMRKPAFLSGEQKKAIVDLLFKTNRKVTVKQLKEDYFKKIECFDSVEISGVEDRFNASLGTYHDLLKIIKDKDFLDNEENEDILEDIVLTLTLFEDREMIEERLKTYAHLFDDKVMKQLKRRRYTGWGRLSRKLINGIRDKQSGKTILDFLKSDGFANRNFMQLIHDDSLTFKEDIQKAQVSGQGDSLHEHIANLAGSPAIKKGILQTVKVVDELVKVMGRHKPENIVIEMARENQTTQKGQKNSRERMKRIEEGIKELGSQILKEHPVENTQLQNEKLYLYYLQNGRDMYVDQELDINRLSDYDVDAIVPQSFLKDDSIDNKVLTRSDKNRGKSDNVPSEEVVKKMKNYWRQLLNAKLITQRKFDNLTKAERGGLSELDKAGFIKRQLVETRQITKHVAQILDSRMNTKYDENDKLIREVKVITLKSKLVSDFRKDFQFYKVREINNYHHAHDAYLNAVVGTALIKKYPKLESEFVYGDYKVYDVRKMIAKSEQEIGKATAKYFFYSNIMNFFKTEITLANGEIRKRPLIETNGETGEIVWDKGRDFATVRKVLSMPQVNIVKKTEVQTGGFSKESILPKRNSDKLIARKKDWDPKKYGGFVSPTVAYSVLVVAKVEKGKSKKLKSVKELLGITIMERSSFEKNPIDFLEAKGYKEVKKDLIIKLPKYSLFELENGRKRMLASARELQKGNELALPSKYVNFLYLASHYEKLKGSPEDNEQKQLFVEQHKHYLDEIIEQISEFSKRVILADANLDKVLSAYNKHRDKPIREQAENIIHLFTLTNLGAPAAFKYFDTTIDRKQYRSTKEVLDATLIHQSITGLYETRIDLSQLGGD

SEQ ID NO: 88 - protein, 1367 aa, synthetic construct
  REGION 1..1367: note = Synthetic
DKKYSIGLDIGTNSVGWAVITDEYKVPSKKFKVLGNTDRHSIKKNLIGALLFDSGETAEATRLKRTARRRYTRRKNRICYLQEIFSNEMAKVDDSFFHRLEESFLVEEDKKHERHPIFGNIVDEVAYHEKYPTIYHLRKKLVDSTDKADLRLIYLALAHMIKFRGHFLIEGDLNPDNSDVDKLFIQLVQTYNQLFEENPINASGVDAKAILSARLSKSRRLENLIAQLPGEKKNGLFGNLIALSLGLTPNFKSNFDLAEDAKLQLSKDTYDDDLDNLLAQIGDQYADLFLAAKNLSDAILLSDILRVNTEITKAPLSASMIKRYDEHHQDLTLLKALVRQQLPEKYKEIFFDQSKNGYAGYIDGGASQEEFYKFIKPILEKMDGTEELLVKLNREDLLRKQRTFDNGSIPHQIHLGELHAILRRQEDFYPFLKDNREKIEKILTFRIPYYVGPLARGNSRFAWMTRKSEETITPWNFEEVVDKGASAQSFIERMTNFDKNLPNEKVLPKHSLLYEYFTVYNELTKVKYVTEGMRKPAFLSGEQKKAIVDLLFKTNRKVTVKQLKEDYFKKIECFDSVEISGVEDRFNASLGTYHDLLKIIKDKDFLDNEENEDILEDIVLTLTLFEDREMIEERLKTYAHLFDDKVMKQLKRRRYTGWGRLSRKLINGIRDKQSGKTILDFLKSDGFANRNFMQLIHDDSLTFKEDIQKAQVSGQGDSLHEHIANLAGSPAIKKGILQTVKVVDELVKVMGRHKPENIVIEMARENQTTQKGQKNSRERMKRIEEGIKELGSQILKEHPVENTQLQNEKLYLYYLQNGRDMYVDQELDINRLSDYDVDAIVPQSFLKDDSIDNKVLTRSDKNRGKSDNVPSEEVVKKMKNYWRQLLNAKLITQRKFDNLTKAERGGLSELDKAGFIKRQLVETRQITKHVAQILDSRMNTKYDENDKLIREVKVITLKSKLVSDFRKDFQFYKVREINNYHHAHDAYLNAVVGTALIKKYPKLESEFVYGDYKVYDVRKMIAKSEQEIGKATAKYFFYSNIMNFFKTEITLANGEIRKRPLIETNGETGEIVWDKGRDFATVRKVLSMPQVNIVKKTEVQTGGFSKESILPKRNSDKLIARKKDWDPKKYGGFVSPTVAYSVLVVAKVEKGKSKKLKSVKELLGITIMERSSFEKNPIDFLEAKGYKEVKKDLIIKLPKYSLFELENGRKRMLASARELQKGNELALPSKYVNFLYLASHYEKLKGSPEDNEQKQLFVEQHKHYLDEIIEQISEFSKRVILADANLDKVLSAYNKHRDKPIREQAENIIHLFTLTNLGAPAAFKYFDTTIDRKEYRSTKEVLDATLIHQSITGLYETRIDLSQLGGD

SEQ ID NO: 89 - protein, 677 aa, unidentified
  REGION 1..677: note = moloney murine leukemia virus
TLNIEDEYRLHETSKEPDVSLGSTWLSDFPQAWAETGGMGLAVRQAPLIIPLKATSTPVSIKQYPMSQEARLGIKPHIQRLLDQGILVPCQSPWNTPLLPVKKPGTNDYRPVQDLREVNKRVEDIHPTVPNPYNLLSGLPPSHQWYTVLDLKDAFFCLRLHPTSQPLFAFEWRDPEMGISGQLTWTRLPQGFKNSPTLFDEALHRDLADFRIQHPDLILLQYVDDLLLAATSELDCQQGTRALLQTLGNLGYRASAKKAQICQKQVKYLGYLLKEGQRWLTEARKETVMGQPTPKTPRQLREFLGTAGFCRLWIPGFAEMAAPLYPLTKTGTLFNWGPDQQKAYQEIKQALLTAPALGLPDLTKPFELFVDEKQGYAKGVLTQKLGPWRRPVAYLSKKLDPVAAGWPPCLRMVAAIAVLTKDAGKLTMGQPLVILAPHAVEALVKQPPDRWLSNARMTHYQALLLDTDRVQFGPVVALNPATLLPLPEEGLQHNCLDILAEAHGTRPDLTDQPLPDADHTWYTDGSSLLQEGQRKAGAAVTTETEVIWAKALPAGTSAQRAELIALTQALKMAEGKKLNVYTDSRYAFATAHIHGEIYRRRGLLTSEGKEIKNKDEILALLKALFLPKRLSIIHCPGHQKGHSAEARGNRMADQAARKAAITETPDTSTLLIENSSP

SEQ ID NO: 90 - protein, 560 aa, unidentified
  REGION 1..560: note = moloney murine leukemia virus
AFPLERPDWDYTTQAGRNHLVHYRQLLLAGLQNAGRSPTNLAKVKGITQGPNESPSAFLERLKEAYRRYTPYDPEDPGQETNVSMSFIWQSAPDIGRKLGRLEDLKSKTLGDLVREAEKIFNKRETPEEREERIRRETEEKEERRRTVDEQKEKERDRRRHREMSKLLATVVIGQEQDRQEGERKRPQLDKDQCAYCKEKGHWAKDCPKKPRGPRGPRPQTSLLTLGDXGGQGQDPPPEPRITLKVGGQPVTFLVDTGAQHSVLTQNPGPLSDKSAWVQGATGGKRYRWTTDRKVHLATGKVTHSFLHVPDCPYPLLGRDLLTKLKAQIHFEGSGAQVVGPMGQPLQVLTLNIEDEYRLHETSKEPDVSLGFTWLSDFPQAWAESGGMGLAVRQAPLIIPLKATSTPVSIKQYPMSQEARLGIKPHIQRLLDQGILVPCQSPWNTPLLPVKKPGTNDYRPVQDLREVNKRVEDIHPTVPNPYNLLSGLPPSHQWYTVLDLKDAFFCLRLHPTSQPLFAFEWRDPEMGISGQLTWTRLPQGFKNSPTLFDEALHRDLADFR

SEQ ID NO: 91 - protein, 669 aa, unidentified
  REGION 1..669: note = Feline leukemia virus
TLQLEEEYRLFEPESTQKQEMDIWLKNFPQAWAETGGMGTAHCQAPVLIQLKATATPISIRQYPMPHEAYQGIKPHIRRMLDQGILKPCQSPWNTPLLPVKKPGTEDYRPVQDLREVNKRVEDIHPTVPNPYNLLSTLPPSHPWYTVLDLKDAFFCLRLHSESQLLFAFEWRDPEIGLSGQLTWTRLPQGFKNSPTLFDEALHSDLADFRVRYPALVLLQYVDDLLLAAATRTECLEGTKALLETLGNKGYRASAKKAQICLQEVTYLGYSLKDGQRWLTKARKEAILSIPVPKNSRQVREFLGTAGYCRLWIPGFAELAAPLYPLTRPGTLFQWGTEQQLAFEDIKKALLSSPALGLPDITKPFELFIDENSGFAKGVLVQKLGPWKRPVAYLSKKLDTVASGWPPCLRMVAAIAILVKDAGKLTLGQPLTILTSHPVEALVRQPPNKWLSNARMTHYQAMLLDAERVHFGPTVSLNPATLLPLPSGGNHHDCLQILAETHGTRPDLTDQPLPDADLTWYTDGSSFIRNGEREAGAAVTTESEVIWAAPLPPGTSAQRAELIALTQALKMAEGKKLTVYTDSRYAFATTHVHGEIYRRRGLLTSEGKEIKNKNEILALLEALFLPKRLSIIHCPGHQKGDSPQAKGNRLADDTAKKAATETHSSLTVL

SEQ ID NO: 92 - protein, 559 aa, unidentified
  REGION 1..559: note = HIV-1
PISPIETVPVKLKPGMDGPKVKQWPLTEEKIKALVEICTEMEKEGKISKIGPENPYNTPVFAIKKKDSTKWRKLVDFRELNKRTQDFWEVQLGIPHPAGLKKKKSVTVLDVGDAYFSVPLDEDFRKYTAFTIPSINNETPGIRYQYNVLPQGWKGSPAIFQSSMTKILEPFRKQNPDIVIYQYMDDLYVGSDLEIGQHRTKIEELRQHLLRWGLTTPDKKHQKEPPFLWMGYELHPDKWTVQPIVLPEKDSWTVNDIQKLVGKLNWASQIYPGIKVRQLXKLLRGTKALTEVIPLTEEAELELAENREILKEPVHGVYYDPSKDLIAEIQKQGQGQWTYQIYQEPFKNLKTGKYARMRGAHTNDVKQLTEAVQKITTESIVIWGKTPKFKLPIQKETWETWWTEYWQATWIPEWEFVNTPPLVKLWYQLEKEPIVGAETFYVDGAANRETKLGKAGYVTNRGRQKVVTLTDTTNQKTELQAIYLALQDSGLEVNIVTDSQYALGIIQAQPDQSESELVNQIIEQLIKKEKVYLAWVPAHKGIGGNEQVDKLVSAGIRKV

SEQ ID NO: 93 - protein, 440 aa, unidentified
  REGION 1..440: note = HIV-1
PISPIETVPVKLKPGMDGPKVKQWPLTEEKIKALVEICTEMEKEGKISKIGPENPYNTPVFAIKKKDSTKWRKLVDFRELNKRTQDFWEVQLGIPHPAGLKKKKSVTVLDVGDAYFSVPLDEDFRKYTAFTIPSINNETPGIRYQYNVLPQGWKGSPAIFQSSMTKILEPFRKQNPDIVIYQYMDDLYVGSDLEIGQHRTKIEELRQHLLRWGLTTPDKKHQKEPPFLWMGYELHPDKWTVQPIVLPEKDSWTVNDIQKLVGKLNWASQIYPGIKVRQLCKLLRGTKALTEVIPLTEEAELELAENREILKEPVHGVYYDPSKDLIAEIQKQGQGQWTYQIYQEPFKNLKTGKYARMRGAHTNDVKQLTEAVQKITTESIVIWGKTPKFKLPIQKETWETWWTEYWQATWIPEWEFVNTPPLVKLWYQLEKEPIVGAETF

SEQ ID NO: 94 - protein, 858 aa, unidentified
  REGION 1..858: note = rous sarcoma virus
TVALHLAIPLKWKPNHTPVWIDQWPLPEGKLVALTQLVEKELQLGHIEPSLSCWNTPVFVIRKASGSYRLLHDLRAVNAKLVPFGAVQQGAPVLSALPRGWPLMVLDLKDCFFSIPLAEQDREAFAFTLPSVNNQAPARRFQWKVLPQGMTCSPTICQLIVGQILEPLRLKHPSLRMLHYMDDLLLAASSHDGLEAAGEEVISTLERAGFTISPDKVQKEPGVQYLGYKLGSTYAAPVGLVAEPRIATLWDVQKLVGSLQWLRPALGIPPRLRGPFYEQLRGSDPNEAREWNLDMKMAWREIVQLSTTAALERWDPALPLEGAVARCEQGAIGVLGQGLSTHPRPCLWLFSTQPTKAFTAWLEVLTLLITKLRASAVRTFGKEVDILLLPACFRDELPLPEGILLALRGFAGKIRSSDTPSIFDIARPLHVSLKVRVTDHPVPGPTVFTDASSSTHKGVVVWREGPRWEIKEIADLGASVQQLEARAVAMALLLWPTTPTNVVTDSAFVAKMLLKMGQEGVPSTAAAFILEDALSQRSAMAAVLHVRSHSEVPGFFTEGNDVADSQATFQAYPLREAKDLHTALHIGPRALSKACNISMQQAREVVQTCPHCNSAPALEAGVNPRGLGPLQIWQTDFTLEPRMAPRSWLAVTVDTASSAIVVTQHGRVTSVAAQHHWATVIAVLGRPKAIKTDNGSCFTSKSTREWLARWGIAHTTGIPGNSQGQAMVERANRLLKDKIRVLAEGDGFMKRIPTSKQGELLAKAMYALNHFERGENTKTPIQKHWRPTVLTEGPPVKIRIETGEWEKGWNVLVWGRGYAAVKNRDTDKVIWVPSRKVKPDIAQKDEVTKKDEASPLFA

SEQ ID NO: 95 - protein, 675 aa, unidentified
  REGION 1..675: note = cauliflower mosaic virus
MMDHLLQKTQIQNQTEQVMNITNPNSIYIKGRLYFKGYKKIELHCFVDTGASLCIASKFVIPEEHWINAERPIMVKIADGSSITINKVCRDIDLIIAGEIFHIPTVYQQESGIDFIIGNNFCQLYEPFIQFTDRVIFTKDRTYPVHIAKLTRAVRVGTEGFLESMKKRSKTQQPEPVNISTNKIAILSEGRRLSEEKLFITQQRMQKIEELLEKVCSENPLDPNKTKQWMKASIKLSDPSKAIKVKPMKYSPMDREEFDKQIKELLDLKVIKPSKSPHMAPAFLVNNEAEKRRGKKRMVVNYKAMNKATVGDAYNLPNKDELLTLIRGKKIFSSFDCKSGFWQVLLDQDSRPLTAFTCPQGHYEWNVVPFGLKQAPSIFQRHMDEAFRVFRKFCCVYVDDILVFSNNEEDHLLHVAMILQKCNQHGIILSKKKAQLFKKKINFLGLEIDEGTHKPQGHILEHINKFPDTLEDKKQLQRFLGILTYASDYIPKLAQIRKPLQAKLKENVPWKWTKEDTLYMQKVKKNLQGFPPLHHPLPEEKLIIETDASDDYWGGMLKAIKINEGTNTELICRYASGSFKAAEKNYHSNDKETLAVINTIKKFSIYLTPVHFLIRTDNTHFKSFVNLNYKGDSKLGRNIRWQAWLSHYSFDVEHIKGTDNHFADFLSREFNRVNS

SEQ ID NO: 96 - protein, 366 aa, unidentified
  REGION 1..366: note = Klebsiella pneumonia
MKEKISKIDKNFYTDIFIKTSFQNEFEAGGVIPPIAKNQVSTISNKNKTFYSLAHSSPHYSIQTRIEKFLLKNIPLSASSFAFRKERSYLHYLEPHTQNVKYCHLDIVSFFHSIDVNIVRDTFSVYFSDEFLVKEKQSLLDAFMASVTLTAELDGVEKTFIPMGFKSSPSISNIIFRKIDILIQKFCDKNKITYTRYADDLLFSTKKENNILSSTFFINEISSILSINKFKLNKSKYLYKEGTISLGGYVIENILKDNSSGNIRLSSSKLNPLYKALYEIKKGSSSKHICIKVFNLKLKRFIYKKNKEKFEAKFYSSQLKNKLLGYRSYLLSFVIFHKKYKCINPIFLEKCVFLISEIESIMNRKF

SEQ ID NO: 97 - protein, 263 aa, Escherichia coli
MKITSNNVTAVINGKGWHSINWKKCHQHVKTIQTRIAKAACNQQWRTVGRLQRLLVRSFSARALAVKRVTENSGRKTPGVDGQIWSTPESKWEAIFKLRRKGYKPLPLKRVFIPKSNGKKRPLGIPVMLDRAMQALHLLGLEPVSETNADHNSYGFRPARCTADAIQQVCNMYSSRNASKWVLEGDIKGCFEHISHEWLLENIPMDKQILRNWLKAGIIEKSIFSKTLSGTPQGGIISPVLANMALDGLERLLQNRFGRNRLI

SEQ ID NO: 98 - protein, 438 aa, Streptococcus pyogenes
MSKIKINYEKYHIKPFPHFDQRIKVNKKVKENLQNPFYIAAHSFYPFIHYKKISYKFKNGTLSSPKERDIFYSGHMDGYIYKHYGEILNHKYNNTCIGKGIDHVSLAYRNNKMGKSNIHFAAEVINFISEQQQAFIFVSDFSSYFDSLDHAILKEKLIEVLEEQDKLSKDWWNVFKHITRYNWVEKEEVISDLECTKEKIARDKKSRERYYTPAEFREFRKRVNIKSNDTGVGIPQGTAISAVLANVYAIDLDQKLNQYALKYGGIYRRYSDDIIMVLPMTSDGQDPSNDHVSFIKSVVKRNKVTMGDSKTSVLYYANNNIYEDYQRKRESKMDYLGFSFDGMTVKIREKSLFKYYHRTYKKINSINWASVKKEKKVGRKKLYLLYSHLGRNYKGHGNFISYCKKAHAVFEGNKKIESLINQQIKRHWKKIQKRLVDV

SEQ ID NO: 99 - protein, 426 aa, Eubacterium rectale
DTSNLMEQILSSDNLNRAYLQVVRNKGAEGVDGMKYTELKEHLAKNGETIKGQLRTRKYKPQPARRVEIPKPDGGVRNLGVPTVTDRFIQQAIAQVLTPIYEEQFHDHSYGFRPNRCAQQAILTALNIMNDGNDWIVDIDLEKFFDTVNHDKLMTLIGRTIKDGDVISIVRKYLVSGIMIDDEYEDSIVGTPQGGNLSPLLANIMLNELDKEMEKRGLNFVRYADDCIIMVGSEMSANRVMRNISRFIEEKLGLKVNMTKSKVDRPSGLKYLGFGFYFDPRAHQFKAKPHAKSVAKFKKRMKELTCRSWGVSNSYKVEKLNQLIRGWINYFKIGSMKTLCKELDSRIRYRLRMCIWKQWKTPQNQEKNLVKLGIDRNTARRVAYTGKRIAYVCNKGAVNVAISNKRLASFGLISMLDYYIEKCVTC

SEQ ID NO: 100 - protein, 412 aa, Geobacillus stearothermophilus
ALLERILARDNLITALKRVEANQGAPGIDGVSTDQLRDYIRAHWSTIHAQLLAGTYRPAPVRRVEIPKPGGGTRQLGIPTVVDRLIQQAILQELTPIFDPDFSSSSFGFRPGRNAHDAVRQAQGYIQEGYRYVVDMDLEKFFDRVNHDILMSRVARKVKDKRVLKLIRAYLQAGVMIEGVKVQTEEGTPQGGPLSPLLANILLDDLDKELEKRGLKFCRYADDCNIYVKSLRAGQRVKQSIQRFLEKTLKLKVNEEKSAVDRPWKRAFLGFSFTPERKARIRLAPRSIQRLKQRIRQLTNPNWSISMPERIHRVNQYVMGWIGYFRLVETPSVLQTIEGWIRRRLRLCQWLQWKRVRTRIRELRALGLKETAVMEIANTRKGAWRTTKTPQLHQALGKTYWTAQGLKSLTQR

SEQ ID NO: 101-105 - skipped (5 entries)

SEQ ID NO: 106 - protein, 677 aa, synthetic construct
  REGION 1..677: note = Synthetic
TLNIEDEYRLHETSKEPDVSLGSTWLSDFPQAWAETGGMGLAVRQAPLIIPLKATSTPVSIKQYPMSQEARLGIKPHIQRLLDQGILVPCQSPWNTPLLPVKKPGTNDYRPVQDLREVNKRVEDIHPTVPNPYNLLSGLPPSHQWYTVLDLKDAFFCLRLHPTSQPLFAFEWRDPEMGISGQLTWTRLPQGFKNSPTLFNEALHRDLADFRIQHPDLILLQYVDDLLLAATSELDCQQGTRALLQTLGNLGYRASAKKAQICQKQVKYLGYLLKEGQRWLTEARKETVMGQPTPKTPRQLREFLGTAGFCRLWIPGFAEMAAPLYPLTKTGTLFNWGPDQQKAYQEIKQALLTAPALGLPDLTKPFELFVDEKQGYAKGVLTQKLGPWRRPVAYLSKKLDPVAAGWPPCLRMVAAIAVLTKDAGKLTMGQPLVILAPHAVEALVKQPPDRWLSNARMTHYQALLLDTDRVQFGPVVALNPATLLPLPEEGLQHNCLDILAEAHGTRPDLTDQPLPDADHTWYTDGSSLLQEGQRKAGAAVTTETEVIWAKALPAGTSAQRAELIALTQALKMAEGKKLNVYTDSRYAFATAHIHGEIYRRRGLLTSEGKEIKNKDEILALLKALFLPKRLSIIHCPGHQKGHSAEARGNRMADQAARKAAITETPDTSTLLIENSSP

SEQ ID NO: 107 - protein, 677 aa, synthetic construct
  REGION 1..677: note = Synthetic
TLNIEDEYRLHETSKEPDVSLGSTWLSDFPQAWAETGGMGLAVRQAPLIIPLKATSTPVSIKQYPMSQEARLGIKPHIQRLLDQGILVPCQSPWNTPLLPVKKPGTNDYRPVQDLREVNKRVEDIHPTVPNPYNLLSGLPPSHQWYTVLDLKDAFFCLRLHPTSQPLFAFEWRDPEMGISGQLTWTRLPQGFKNSPTLFNEALHRDLADFRIQHPDLILLQYVDDLLLAATSELDCQQGTRALLQTLGNLGYRASAKKAQICQKQVKYLGYLLKEGQRWLTEARKETVMGQPTPKTPRQLREFLGTAGFCRLWIPGFAEMAAPLYPLTKPGTLFNWGPDQQKAYQEIKQALLTAPALGLPDLTKPFELFVDEKQGYAKGVLTQKLGPWRRPVAYLSKKLDPVAAGWPPCLRMVAAIAVLTKDAGKLTMGQPLVILAPHAVEALVKQPPDRWLSNARMTHYQALLLDTDRVQFGPVVALNPATLLPLPEEGLQHNCLDILAEAHGTRPDLTDQPLPDADHTWYTDGSSLLQEGQRKAGAAVTTETEVIWAKALPAGTSAQRAELIALTQALKMAEGKKLNVYTDSRYAFATAHIHGEIYRRRGLLTSEGKEIKNKDEILALLKALFLPKRLSIIHCPGHQKGHSAEARGNRMADQAARKAAITETPDTSTLLIENSSP

SEQ ID NO: 108 - protein, 677 aa, synthetic construct
  REGION 1..677: note = Synthetic
TLNIEDEYRLHETSKEPDVSLGSTWLSDFPQAWAETGGMGLAVRQAPLIIPLKATSTPVSIKQYPMSQEARLGIKPHIQRLLDQGILVPCQSPWNTPLLPVKKPGTNDYRPVQDLREVNKRVEDIHPTVPNPYNLLSGLPPSHQWYTVLDLKDAFFCLRLHPTSQPLFAFEWRDPEMGISGQLTWTRLPQGFKNSPTLFNEALHRDLADFRIQHPDLILLQYVDDLLLAATSELDCQQGTRALLQTLGNLGYRASAKKAQICQKQVKYLGYLLKEGQRWLTEARKETVMGQPTPKTPRQLREFLGTAGFCRLWIPGFAEMAAPLYPLTKPGTLFNWGPDQQKAYQEIKQALLTAPALGLPDLTKPFELFVDEKQGYAKGVLTQKLGPWRRPVAYLSKKLDPVAAGWPPCLRMVAAIAVLTKDAGKLTMGQPLVILAPHAVEALVKQPPDRWLSNARMTHYQALLLDTDRVQFGPVVALNPATLLPLPEEGLQHNCLDILAEAHGTRPDLTDQPLPDADHTWYTDGSSLLQEGQRKAGAAVTTETEVIWAKALPAGTSAQRAELIALTQALKMAEGKKLNVYTDSRYAFATAHIHGEIYRRRGWLTSEGKEIKNKDEILALLKALFLPKRLSIIHCPGHQKGHSAEARGNRMADQAARKAAITETPDTSTLLIENSSP

SEQ ID NO: 109 - protein, 677 aa, synthetic construct
  REGION 1..677: note = Synthetic
TLNIEDEYRLHETSKEPDVSLGSTWLSDFPQAWAETGGMGLAVRQAPLIIPLKATSTPVSIKQYPMSQKARLGIKPHIQRLLDQGILVPCQSPWNTPLLPVKKPGTNDYRPVQDLREVNKRVEDIHPTVPNPYNLLSGLPPSHQWYTVLDLKDAFFCLRLHPTSQPLFAFEWRDPEMGISGQLTWTRLPQGFKNSPTLFNEALHRDLADFRIQHPDLILLQYVDDLLLAATSELDCQQGTRALLQTLGNLGYRASAKKAQICQKQVKYLGYLLKEGQRWLTEARKETVMGQPTPKTPRQLREFLGTAGFCRLWIPGFAEMAAPLYPLTKPGTLFNWGPDQQKAYQEIKQALLTAPALGLPDLTKPFELFVDEKQGYAKGVLTQKLGPWRRPVAYLSKKLDPVAAGWPPCLRMVAAIAVLTKDAGKLTMGQPLVILAPHAVEALVKQPPDRWLSNARMTHYQALLLDTDRVQFGPVVALNPATLLPLPEEGLQHNCLDILAEAHGTRPDLTDQPLPDADHTWYTDGSSLLQEGQRKAGAAVTTETEVIWAKALPAGTSAQRAELIALTQALKMAEGKKLNVYTDSRYAFATAHIHGEIYRRRGWLTSEGKEIKNKDEILALLKALFLPKRLSIIHCPGHQKGHSAEARGNRMADQAARKAAITETPDTSTLLIENSSP

SEQ ID NO: 110 - protein, 677 aa, synthetic construct
  REGION 1..677: note = Synthetic
TLNIEDEYRLHETSKEPDVSLGSTWLSDFPQAWAETGGMGLAVRQAPLIIPLKATSTPVSIKQYPMSQEARLGIKPHIQRLLDQGILVPCQSPWNTPLLPVKKPGTNDYRPVQDLREVNKRVEDIHPTVPNPYNLLSGLPPSHQWYTVLDLKDAFFCLRLHPTSQPLFAFEWRDPEMGISGQLTWTRLPQGFKNSPTLFNEALHRDLADFRIQHPDLILLQYVDDLLLAATSELDCQQGTRALLQTLGNLGYRASAKKAQICQKQVKYLGYLLKEGQRWLTEARKETVMGQPTPKTPRQLRRFLGTAGFCRLWIPGFAEMAAPLYPLTKPGTLFNWGPDQQKAYQEIKQALLTAPALGLPDLTKPFELFVDEKQGYAKGVLTQKLGPWRRPVAYLSKKLDPVAAGWPPCLRMVAAIAVLTKDAGKLTMGQPLVILAPHAVEALVKQPPDRWLSNARMTHYQALLLDTDRVQFGPVVALNPATLLPLPEEGLQHNCLDILAEAHGTRPDLTDQPLPDADHTWYTDGSSLLQEGQRKAGAAVTTETEVIWAKALPAGTSAQRAELIALTQALKMAEGKKLNVYTDSRYAFATAHIHGEIYRRRGWLTSEGKEIKNKDEILALLKALFLPKRLSIIHCPGHQKGHSAEARGNRMADQAARKAAITETPDTSTLLIENSSP

SEQ ID NO: 111 - protein, 677 aa, synthetic construct
  REGION 1..677: note = Synthetic
TLNIEDEYRLHETSKEPDVSLGSTWLSDFPQAWAETGGMGLAVRQAPLIIPLKATSTPVSIKQYPMSQEARLGIKPHIQRLLDQGILVPCQSPWNTPLLPVKKPGTNDYRPVQDLREVNKRVEDIHPTVPNPYNLLSGLPPSHQWYTVLDLKDAFFCLRLHPTSQPLFAFEWRDPEMGISGQLTWTRLPQGFKNSPTLFNEALHRDLADFRIQHPDLILLQYVDDLLLAATSELDCQQGTRALLQTLGNLGYRASAKKAQICQKQVKYLGYLLKEGQRWLTEARKETVMGQPTPKTPRQLREFLGTAGFCRLWIPGFAEMAAPLYPLTKPGTLFNWGPDQQKAYQEIKQALLTAPALGLPDLTKPFELFVDEKQGYAKGVLTQKLGPWRRPVAYLSKKLDPVAAGWPPCLRMVAAIAVLTKDAGKLTMGQPLVILAPHAVEALVKQPPDRWLSNARMTHYQALLLDTDRVQFGPVVALNPATLLPLPEEGLQHNCLDILAEAHGTRPDLTDQPLPDADHTWYTDGSSLLQEGQRKAGAAVTTETEVIWAKALPAGTSAQRAELIALTQALKMAEGKKLNVYTDSRYAFATAHIHGEIYRRRGWLTSKGKEIKNKDEILALLKALFLPKRLSIIHCPGHQKGHSAEARGNRMADQAARKAAITETPDTSTLLIENSSP

SEQ ID NO: 112 - protein, 677 aa, synthetic construct
  REGION 1..677: note = Synthetic
TLNIEDEYRLHETSKEPDVSLGSTWLSDFPQAWAETGGMGLAVRQAPLIIPLKATSTPVSIKQYPMSQEARLGIKPHIQRLLDQGILVPCQSPWNTPLLPVKKPGTNDYRPVQDLREVNKRVEDIHPTVPNPYNLLSGPPPSHQWYTVLDLKDAFFCLRLHPTSQPLFAFEWRDPEMGISGQLTWTRLPQGFKNSPTLFNEALHRDLADFRIQHPDLILLQYVDDLLLAATSELDCQQGTRALLQTLGNLGYRASAKKAQICQKQVKYLGYLLKEGQRWLTEARKETVMGQPTPKTPRQLREFLGTAGFCRLWIPGFAEMAAPLYPLTKPGTLFNWGPDQQKAYQEIKQALLTAPALGLPDLTKPFELFVDEKQGYAKGVLTQKLGPWRRPVAYLSKKLDPVAAGWPPCLRMVAAIAVLTKDAGKLTMGQPLVILAPHAVEALVKQPPDRWLSNARMTHYQALLLDTDRVQFGPVVALNPATLLPLPEEGLQHNCLDILAEAHGTRPDLTDQPLPDADHTWYTDGSSLLQEGQRKAGAAVTTETEVIWAKALPAGTSAQRAELIALTQALKMAEGKKLNVYTDSRYAFATAHIHGEIYRRRGWLTSEGKEIKNKDEILALLKALFLPKRLSIIHCPGHQKGHSAEARGNRMADQAARKAAITETPDTSTLLIENSSP

SEQ ID NO: 113 - protein, 677 aa, synthetic construct
  REGION 1..677: note = Synthetic
TLNIEDEYRLHETSKEPDVSLGSTWLSDFPQAWAETGGMGLAVRQAPLIIPLKATSTPVSIKQYPMSQEARLGIKPHIQRLLDQGILVPCQSPWNTPLLPVKKPGTNDYRPVQDLREVNKRVEDIHPTVPNPYNLLSGLPPSHQWYTVLDLKDAFFCLRLHPTSQPLFAFEWRDPEMGISGQLTWTRLPQGFKNSPTLFNEALHRDLADFRIQHPDLILLQYVDDLLLAATSELDCQQGTRALLQTLGNLGYRASAKKAQICQKQVKYLGYLLKEGQRWLTEARKETVMGQPTPKTPRQLREFLGTAGFCRLWIPGFAEMAAPLYPLTKPGTLFNWGPDQQKAYQEIKQALLTAPALGLPDLTKPFELFVDEKQGYAKGVLTQKLGPWRRPVAYLSKKLDPVAAGWPPCLRMVAAIAVLTKDAGKLTMGQPLVIGAPHAVEALVKQPPDRWLSNARMTHYQALLLDTDRVQFGPVVALNPATLLPLPEEGLQHNCLDILAEAHGTRPDLTDQPLPDADHTWYTDGSSLLQEGQRKAGAAVTTETEVIWAKALPAGTSAQRAELIALTQALKMAEGKKLNVYTDSRYAFATAHIHGEIYRRRGWLTSEGKEIKNKDEILALLKALFLPKRLSIIHCPGHQKGHSAEARGNRMADQAARKAAITETPDTSTLLIENSSP

SEQ ID NO: 114 - protein, 677 aa, synthetic construct
  REGION 1..677: note = Synthetic
TLNIEDEYRLHETSKEPDVSLGSTWLSDFPQAWAETGGMGLAVRQAPLIIPLKATSTPVSIKQYPMSQEARLGIKPHIQRLLDQGILVPCQSPWNTPLLPVKKPGTNDYRPVQDLREVNKRVEDIHPTVPNPYNLLSGLPPSHQWYTVLDLKDAFFCLRLHPTSQPLFAFEWRDPEMGISGQLTWTRLPQGFKNSPTLFNEALHRDLADFRIQHPDLILLQYVDDLLLAATSELDCQQGTRALLQTLGNLGYRASAKKAQICQKQVKYLGYLLKEGQRWLTEARKETVMGQPTPKTPRQLREFLGTAGFCRLWIPGFAEMAAPLYPLTKPGTLFNWGPDQQKAYQEIKQALLTAPALGLPDLTKPFELFVDEKQGYAKGVLTQKLGPWRRPVAYLSKKLDPVAAGWPPCLRMVAAIAVLTKDAGKLTMGQPLVILAPHAVEALVKQPPDRWLSKARMTHYQALLLDTDRVQFGPVVALNPATLLPLPEEGLQHNCLDILAEAHGTRPDLTDQPLPDADHTWYTDGSSLLQEGQRKAGAAVTTETEVIWAKALPAGTSAQRAELIALTQALKMAEGKKLNVYTDSRYAFATAHIHGEIYRRRGWLTSEGKEIKNKDEILALLKALFLPKRLSIIHCPGHQKGHSAEARGNRMADQAARKAAITETPDTSTLLIENSSP

SEQ ID NO: 115 - protein, 677 aa, synthetic construct
  REGION 1..677: note = Synthetic
TLNIEDEYRLHETSKEPDVSLGSTWLSDFPQAWAETGGMGLAVRQAPLIIPLKATSTPVSIKQYPMSQEARLGIKPHIQRLLDQGILVPCQSPWNTPLLPVKKPGTNDYRPVQDLREVNKRVEDIHPTVPNPYNLLSGLPPSHQWYTVLDLKDAFFCLRLHPTSQPLFAFEWRDPEMGISGQLTWTRLPQGFKNSPTLFNEALHRDLADFRIQHPDLILLQYVDDLLLAATSELDCQQGTRALLQTLGNLGYRASAKKAQICQKQVKYLGYLLKEGQRWLTEARKETVMGQPTPKTPRQLREFLGKAGFCRLWIPGFAEMAAPLYPLTKPGTLFNWGPDQQKAYQEIKQALLTAPALGLPDLTKPFELFVDEKQGYAKGVLTQKLGPWRRPVAYLSKKLDPVAAGWPPCLRMVAAIAVLTKDAGKLTMGQPLVILAPHAVEALVKQPPDRWLSNARMTHYQALLLDTDRVQFGPVVALNPATLLPLPEEGLQHNCLDILAEAHGTRPDLTDQPLPDADHTWYTDGSSLLQEGQRKAGAAVTTETEVIWAKALPAGTSAQRAELIALTQALKMAEGKKLNVYTDSRYAFATAHIHGEIYRRRGWLTSEGKEIKNKDEILALLKALFLPKRLSIIHCPGHQKGHSAEARGNRMADQAARKAAITETPDTSTLLIENSSP

SEQ ID NO: 116 - protein, 677 aa, synthetic construct
  REGION 1..677: note = Synthetic
TLNIEDEYRLHETSKEPDVSLGSTWLSDFPQAWAETGGMGLAVRQAPLIIPLKATSTPVSIKQYPMSQEARLGIKPHIQRLLDQGILVPCQSPWNTPLLPVKKPGTNDYRPVQDLREVNKRVEDIHPTVPNPYNLLSGLPPSHQWYTVLDLKDAFFCLRLHPTSQPLFAFEWRDPEMGISGQLTWTRLPQGFKNSPTLFNEALHRDLADFRIQHPDLILLQYVDDLLLAATSELDCQQGTRALLQTLGNLGYRASAKKAQICQKQVKYLGYLLKEGQRWLTEARKETVMGQPTPKTPRQLREFLGTAGFCRLFIPGFAEMAAPLYPLTKPGTLFNWGPDQQKAYQEIKQALLTAPALGLPDLTKPFELFVDEKQGYAKGVLTQKLGPWRRPVAYLSKKLDPVAAGWPPCLRMVAAIAVLTKDAGKLTMGQPLVILAPHAVEALVKQPPDRWLSNARMTHYQALLLDTDRVQFGPVVALNPATLLPLPEEGLQHNCLDILAEAHGTRPDLTDQPLPDADHTWYTDGSSLLQEGQRKAGAAVTTETEVIWAKALPAGTSAQRAELIALTQALKMAEGKKLNVYTDSRYAFATAHIHGEIYRRRGWLTSEGKEIKNKDEILALLKALFLPKRLSIIHCPGHQKGHSAEARGNRMADQAARKAAITETPDTSTLLIENSSP

SEQ ID NO: 117 - protein, 677 aa, synthetic construct
  REGION 1..677: note = Synthetic
TLNIEDEYRLHETSKEPDVSLGSTWLSDFPQAWAETGGMGLAVRQAPLIIPLKATSTPVSIKQYPMSQEARLGIKPHIQRLLDQGILVPCQSPWNTPLLPVKKPGTNDYRPVQDLREVNKRVEDIHPTVPNPYNLLSGLPPSHQWYTVLDLKDAFFCLRLHPTSQPLFAFEWRDPEMGISGQLTWTRLPQGFKNSPTLFNEALHRDLADFRIQHPDLILLQYVDDLLLAATSELDCQQGTRALLQTLGNLGYRASAKKAQICQKQVKYLGYLLKEGQRWLTEARKETVMGQPTPKTPRQLREFLGTAGFCRLWIPGFAEMAAPLYPLTKPGTLFNWGPDQQKAYQEIKQALLTAPALGLPDLTKPFELFVDEKQGYAKGVLTQKLGPWRRPVAYLSKKLDPVAAGWPPCLRMVAAIAVLTKDAGKLTMGQPLVILAPHAVEALVKQPPDRWLSNARMTHYQALLLDTDRVQFGPVVALNPATLLPLPEEGLQHNCLDILAEAHGTRPDLTDQPLPDADHTWYTGGSSLLQEGQRKAGAAVTTETEVIWAKALPAGTSAQRAQLIALTQALKMAEGKKLNVYTNSRYAFATAHIHGEIYRRRGWLTSEGKEIKNKDEILALLKALFLPKRLSIIHCPGHQKGHSAEARGNRMADQAARKAAITETPDTSTLLIENSSP

SEQ ID NO: 118 - protein, 677 aa, synthetic construct
  REGION 1..677: note = Synthetic
TLNIEDEYRLHETSKEPDVSLGSTWLSDFPQAWAETGGMGLAVRQAPLIIPLKATSTPVSIKQYPMSQEARLGIKPHIQRLLDQGILVPCQSPWNTPLLPVKKPGTNDYRPVQDLREVNKRVEDIHPTVPNPYNLLSGLPPSHQWYTVLDLKDAFFCLRLHPTSQPLFAFEWRDPEMGISGQLTWTRLPQGFKNSPTLFNEALHRDLADFRIQHPDLILLQYVDDLLLAATSELDCQQGTRALLQTLGNLGYRASAKKAQICQKQVKYLGYLLKEGQRWLTEARKETVMGQPTPKTPRQLRRFLGTAGFCRLFIPGFAEMAAPLYPLTKPGTLFNWGPDQQKAYQEIKQALLTAPALGLPDLTKPFELFVDEKQGYAKGVLTQKLGPWRRPVAYLSKKLDPVAAGWPPCLRMVAAIAVLTKDAGKLTMGQPLVILAPHAVEALVKQPPDRWLSNARMTHYQALLLDTDRVQFGPVVALNPATLLPLPEEGLQHNCLDILAEAHGTRPDLTDQPLPDADHTWYTDGSSLLQEGQRKAGAAVTTETEVIWAKALPAGTSAQRAELIALTQALKMAEGKKLNVYTDSRYAFATAHIHGEIYRRRGWLTSEGKEIKNKDEILALLKALFLPKRLSIIHCPGHQKGHSAEARGNRMADQAARKAAITETPDTSTLLIENSSP

SEQ ID NO: 119 - protein, 677 aa, synthetic construct
  REGION 1..677: note = Synthetic
TLNIEDEYRLHETSKEPDVSLGSTWLSDFPQAWAETGGMGLAVRQAPLIIPLKATSTPVSIKQYPMSQEARLGIKPHIQRLLDQGILVPCQSPWNTPLLPVKKPGTNDYRPVQDLREVNKRVEDIHPTVPNPYNLLSGPPPSHQWYTVLDLKDAFFCLRLHPTSQPLFAFEWRDPEMGISGQLTWTRLPQGFKNSPTLFNEALHRDLADFRIQHPDLILLQYVDDLLLAATSELDCQQGTRALLQTLGNLGYRASAKKAQICQKQVKYLGYLLKEGQRWLTEARKETVMGQPTPKTPRQLREFLGTAGFCRLWIPGFAEMAAPLYPLTKPGTLFNWGPDQQKAYQEIKQALLTAPALGLPDLTKPFELFVDEKQGYAKGVLTQKLGPWRRPVAYLSKKLDPVAAGWPPCLRMVAAIAVLTKDAGKLTMGQPLVILAPHAVEALVKQPPDRWLSNARMTHYQALLLDTDRVQFGPVVALNPATLLPLPEEGLQHNCLDILAEAHGTRPDLTDQPLPDADHTWYTDGSSLLQEGQRKAGAAVTTETEVIWAKALPAGTSAQRAELIALTQALKMAEGKKLNVYTDSRYAFATAHIHGEIYRRRGWLTSKGKEIKNKDEILALLKALFLPKRLSIIHCPGHQKGHSAEARGNRMADQAARKAAITETPDTSTLLIENSSP

SEQ ID NO: 120 - protein, 677 aa, synthetic construct
  REGION 1..677: note = Synthetic
TLNIEDEYRLHETSKEPDVSLGSTWLSDFPQAWAETGGMGLAVRQAPLIILLKATSTPVSIKQYPMKQEARLGIKPHIQRLLDQGILVPCQSPWNTPLLPVKKPGTNDYRPVQDLREVNKRVEDIHPTVPNPYNLLSGLPPSHQWYTVLDLKDAFFCLRLHPTSQPLFAFEWRDPEMGISGQLTWTRLPQGFKNSPALFDEALRRDLADFRIQHPDLILLQYVDDLLLAATSELDCQQGTRALLQTLGNLGYRASAKKAQICQKQVKYLGYLLKEGQRWLTEARKETVMGQPTPKTPRQLRKFLGTAGNCRLFIPGFAEMAAPLYPLTKPGTLFNWGPDQQKAYQEIKQALLTAPALGLPDLTKPFELFVDEKQGYAKGVLTQKLGPWRRPVAYLSKKLDPVAAGWPPCLRMVAAIAVLTKDAGKLTMGQPLVIGAPHAVEALVKQPPDRWLSKARMTHYQALLLDTDRVQFGPVVALNPATLLPLPEEGLQHNCLDILAEAHGTRPDLTDQPLPDADHTWYTGGSSLLQEGQRKAGAAVTTETEVIWAKALPAGTSAQRAELIALTQALKMAEGKKLNVYTNSRYAFATAHIQGEIYRRRGLLTSEGKEIKNKDEILALLKALFLPKRLSIIHCPGHQKGHSAEARGNRMANQAARKAAITETPDTSTLLIENSSP

SEQ ID NO: 121 - protein, 677 aa, synthetic construct
  REGION 1..677: note = Synthetic
TLNIEDEYRLHETSKEPDVSLGSTWLSDFPQAWAETGGMGLAVRQAPLIILLKATSTPVSIKQYPMKQEARLGIKPHIQRLLDQGILVPCQSPWNTPLLPVKKPGTNDYRPVQDLREVNKRVEDIHPTVPNPYNLLSGLPPSHQWYTVLDLKDAFFCLRLHPTSQPLFAFEWRDPEMGISGQLTWTRLPQGFKNSPALFNEALRRDLADFRIQHPDLILLQYVDDLLLAATSELDCQQGTRALLQTLGNLGYRASAKKAQICQKQVKYLGYLLKEGQRWLTEARKETVMGQPTPKTPRQLRKFLGTAGNCRLFIPGFAEMAAPLYPLTKPGTLFNWGPDQQKAYQEIKQALLTAPALGLPDLTKPFELFVDEKQGYAKGVLTQKLGPWRRPVAYLSKKLDPVAAGWPPCLRMVAAIAVLTKDAGKLTMGQPLVIGAPHAVEALVKQPPDRWLSKARMTHYQALLLDTDRVQFGPVVALNPATLLPLPEEGLQHNCLDILAEAHGTRPDLTDQPLPDADHTWYTGGSSLLQEGQRKAGAAVTTETEVIWAKALPAGTSAQRAELIALTQALKMAEGKKLNVYTNSRYAFATAHIQGEIYRRRGLLTSEGKEIKNKDEILALLKALFLPKRLSIIHCPGHQKGHSAEARGNRMANQAARKAAITETPDTSTLLIENSSP

SEQ ID NO: 122 - protein, 677 aa, synthetic construct
  REGION 1..677: note = Synthetic
TLNIEDEYRLHETSKEPDVSLGSTWLSDFPQAWAETGGMGLAVRQAPLIIPLKATSTPVSIKQYPMSQEARLGIKPHIQRLLDQGILVPCQSPWNTPLLPVKKPGTNDYRPVQDLREVNKRVEDIHPTVPNPYNLLSGLPPSHQWYTVLDLKDAFFCLRLHPTSQPLFAFEWRDPEMGISGQLTWTRLPQGFKNSPTLFNEALHRDLADFRIQHPDLILLQYVDDLLLAATSELDCQQGTRALLQTLGNLGYRASAKKAQICQKQVKYLGYLLKEGQRWLTEARKETVMGQPTPKTPRQLREFLGKAGFCRLFIPGFAEMAAPLYPLTKPGTLFNWGPDQQKAYQEIKQALLTAPALGLPDLTKPFELFVDEKQGYAKGVLTQKLGPWRRPVAYLSKKLDPVAAGWPPCLRMVAAIAVLTKDAGKLTMGQPLVILAPHAVEALVKQPPDRWLSNARMTHYQALLLDTDRVQFGPVVALNPATLLPLPEEGLQHNCLDILAEAHGTRPDLTDQPLPDADHTWYTDGSSLLQEGQRKAGAAVTTETEVIWAKALPAGTSAQRAELIALTQALKMAEGKKLNVYTDSRYAFATAHIHGEIYRRRGWLTSEGKEIKNKDEILALLKALFLPKRLSIIHCPGHQKGHSAEARGNRMADQAARKAAITETPDTSTLLIENSSP

SEQ ID NO: 123 - protein, 2117 aa, synthetic construct
  REGION 1..2117: note = Synthetic
MKRTADGSEFESPKKKRKVDKKYSIGLDIGTNSVGWAVITDEYKVPSKKFKVLGNTDRHSIKKNLIGALLFDSGETAEATRLKRTARRRYTRRKNRICYLQEIFSNEMAKVDDSFFHRLEESFLVEEDKKHERHPIFGNIVDEVAYHEKYPTIYHLRKKLVDSTDKADLRLIYLALAHMIKFRGHFLIEGDLNPDNSDVDKLFIQLVQTYNQLFEENPINASGVDAKAILSARLSKSRRLENLIAQLPGEKKNGLFGNLIALSLGLTPNFKSNFDLAEDAKLQLSKDTYDDDLDNLLAQIGDQYADLFLAAKNLSDAILLSDILRVNTEITKAPLSASMIKRYDEHHQDLTLLKALVRQQLPEKYKEIFFDQSKNGYAGYIDGGASQEEFYKFIKPILEKMDGTEELLVKLNREDLLRKQRTFDNGSIPHQIHLGELHAILRRQEDFYPFLKDNREKIEKILTFRIPYYVGPLARGNSRFAWMTRKSEETITPWNFEEVVDKGASAQSFIERMTNFDKNLPNEKVLPKHSLLYEYFTVYNELTKVKYVTEGMRKPAFLSGEQKKAIVDLLFKTNRKVTVKQLKEDYFKKIECFDSVEISGVEDRFNASLGTYHDLLKIIKDKDFLDNEENEDILEDIVLTLTLFEDREMIEERLKTYAHLFDDKVMKQLKRRRYTGWGRLSRKLINGIRDKQSGKTILDFLKSDGFANRNFMQLIHDDSLTFKEDIQKAQVSGQGDSLHEHIANLAGSPAIKKGILQTVKVVDELVKVMGRHKPENIVIEMARENQTTQKGQKNSRERMKRIEEGIKELGSQILKEHPVENTQLQNEKLYLYYLQNGRDMYVDQELDINRLSDYDVDAIVPQSFLKDDSIDNKVLTRSDKNRGKSDNVPSEEVVKKMKNYWRQLLNAKLITQRKFDNLTKAERGGLSELDKAGFIKRQLVETRQITKHVAQILDSRMNTKYDENDKLIREVKVITLKSKLVSDFRKDFQFYKVREINNYHHAHDAYLNAVVGTALIKKYPKLESEFVYGDYKVYDVRKMIAKSEQEIGKATAKYFFYSNIMNFFKTEITLANGEIRKRPLIETNGETGEIVWDKGRDFATVRKVLSMPQVNIVKKTEVQTGGFSKESILPKRNSDKLIARKKDWDPKKYGGFDSPTVAYSVLVVAKVEKGKSKKLKSVKELLGITIMERSSFEKNPIDFLEAKGYKEVKKDLIIKLPKYSLFELENGRKRMLASAGELQKGNELALPSKYVNFLYLASHYEKLKGSPEDNEQKQLFVEQHKHYLDEIIEQISEFSKRVILADANLDKVLSAYNKHRDKPIREQAENIIHLFTLTNLGAPAAFKYFDTTIDRKRYTSTKEVLDATLIHQSITGLYETRIDLSQLGGDSGGSSGGSSGSETPGTSESATPESSGGSSGGSSTLNIEDEYRLHETSKEPDVSLGSTWLSDFPQAWAETGGMGLAVRQAPLIIPLKATSTPVSIKQYPMSQEARLGIKPHIQRLLDQGILVPCQSPWNTPLLPVKKPGTNDYRPVQDLREVNKRVEDIHPTVPNPYNLLSGLPPSHQWYTVLDLKDAFFCLRLHPTSQPLFAFEWRDPEMGISGQLTWTRLPQGFKNSPTLFDEALHRDLADFRIQHPDLILLQYVDDLLLAATSELDCQQGTRALLQTLGNLGYRASAKKAQICQKQVKYLGYLLKEGQRWLTEARKETVMGQPTPKTPRQLREFLGTAGFCRLWIPGFAEMAAPLYPLTKTGTLFNWGPDQQKAYQEIKQALLTAPALGLPDLTKPFELFVDEKQGYAKGVLTQKLGPWRRPVAYLSKKLDPVAAGWPPCLRMVAAIAVLTKDAGKLTMGQPLVILAPHAVEALVKQPPDRWLSNARMTHYQALLLDTDRVQFGPVVALNPATLLPLPEEGLQHNCLDILAEAHGTRPDLTDQPLPDADHTWYTDGSSLLQEGQRKAGAAVTTETEVIWAKALPAGTSAQRAELIALTQALKMAEGKKLNVYTDSRYAFATAHIHGEIYRRRGLLTSEGKEIKNKDEILALLKALFLPKRLSIIHCPGHQKGHSAEARGNRMADQAARKAAITETPDTSTLLIENSSPSGGSKRTADGSEFEPKKKRKV

SEQ ID NO: 124 - protein, 19 aa, synthetic construct
  REGION 1..19: note = Synthetic
MKRTADGSEFESPKKKRKV

SEQ ID NO: 125 - protein, 17 aa, synthetic construct
  REGION 1..17: note = Synthetic
KRTADGSEFEPKKKRKV

SEQ ID NO: 126 - protein, 1367 aa, Streptococcus pyogenes; identical to SEQ ID NO: 55

SEQ ID NO: 127 - protein, 33 aa, synthetic construct
  REGION 1..33: note = Synthetic
SGGSSGGSSGSETPGTSESATPESSGGSSGGSS

SEQ ID NO: 128 - protein, 677 aa, unidentified; identical to SEQ ID NO: 89
  REGION 1..677: note = moloney murine leukemia virus

SEQ ID NO: 129 - skipped

SEQ ID NO: 130 - protein, 1367 aa, Streptococcus pyogenes; identical to SEQ ID NO: 55

SEQ ID NO: 131 - DNA, 76 bp, synthetic construct
  source 1..76: mol_type = other DNA
gttttagagctagaaatagcaagttaaaataaggctagtccgttatcaacttgaaaaagtggcaccgagtcggtgc

SEQ ID NO: 132 - protein, 677 aa, unidentified; identical to SEQ ID NO: 89
  REGION 1..677: note = moloney murine leukemia virus

SEQ ID NO: 133 - protein, 21 aa, synthetic construct
  REGION 1..21: note = Synthetic
SGGSKRTADGSEFEPKKKRKV

SEQ ID NO: 134 - protein, 2117 aa, synthetic construct
  REGION 1..2117: note = Synthetic
MKRTADGSEFESPKKKRKVDKKYSIGLDIGTNSVGWAVITDEYKVPSKKFKVLGNTDRHSIKKNLIGALLFDSGETAEATRLKRTARRRYTRRKNRICYLQEIFSNEMAKVDDSFFHRLEESFLVEEDKKHERHPIFGNIVDEVAYHEKYPTIYHLRKKLVDSTDKADLRLIYLALAHMIKFRGHFLIEGDLNPDNSDVDKLFIQLVQTYNQLFEENPINASGVDAKAILSARLSKSRRLENLIAQLPGEKKNGLFGNLIALSLGLTPNFKSNFDLAEDAKLQLSKDTYDDDLDNLLAQIGDQYADLFLAAKNLSDAILLSDILRVNTEITKAPLSASMIKRYDEHHQDLTLLKALVRQQLPEKYKEIFFDQSKNGYAGYIDGGASQEEFYKFIKPILEKMDGTEELLVKLNREDLLRKQRTFDNGSIPHQIHLGELHAILRRQEDFYPFLKDNREKIEKILTFRIPYYVGPLARGNSRFAWMTRKSEETITPWNFEEVVDKGASAQSFIERMTNFDKNLPNEKVLPKHSLLYEYFTVYNELTKVKYVTEGMRKPAFLSGEQKKAIVDLLFKTNRKVTVKQLKEDYFKKIECFDSVEISGVEDRFNASLGTYHDLLKIIKDKDFLDNEENEDILEDIVLTLTLFEDREMIEERLKTYAHLFDDKVMKQLKRRRYTGWGRLSRKLINGIRDKQSGKTILDFLKSDGFANRNFMQLIHDDSLTFKEDIQKAQVSGQGDSLHEHIANLAGSPAIKKGILQTVKVVDELVKVMGRHKPENIVIEMARENQTTQKGQKNSRERMKRIEEGIKELGSQILKEHPVENTQLQNEKLYLYYLQNGRDMYVDQELDINRLSDYDVDAIVPQSFLKDDSIDNKVLTRSDKNRGKSDNVPSEEVVKKMKNYWRQLLNAKLITQRKFDNLTKAERGGLSELDKAGFIKRQLVETRQITKHVAQILDSRMNTKYDENDKLIREVKVITLKSKLVSDFRKDFQFYKVREINNYHHAHDAYLNAVVGTALIKKYPKLESEFVYGDYKVYDVRKMIAKSEQEIGKATAKYFFYSNIMNFFKTEITLANGEIRKRPLIETNGETGEIVWDKGRDFATVRKVLSMPQVNIVKKTEVQTGGFSKESILPKRNSDKLIARKKDWDPKKYGGFDSPTVAYSVLVVAKVEKGKSKKLKSVKELLGITIMERSSFEKNPIDFLEAKGYKEVKKDLIIKLPKYSLFELENGRKRMLASAGELQKGNELALPSKYVNFLYLASHYEKLKGSPEDNEQKQLFVEQHKHYLDEIIEQISEFSKRVILADANLDKVLSAYNKHRDKPIREQAENIIHLFTLTNLGAPAAFKYFDTTIDRKRYTSTKEVLDATLIHQSITGLYETRIDLSQLGGDSGGSSGGSSGSETPGTSESATPESSGGSSGGSSTLNIEDEYRLHETSKEPDVSLGSTWLSDFPQAWAETGGMGLAVRQAPLIIPLKATSTPVSIKQYPMSQEARLGIKPHIQRLLDQGILVPCQSPWNTPLLPVKKPGTNDYRPVQDLREVNKRVEDIHPTVPNPYNLLSGLPPSHQWYTVLDLKDAFFCLRLHPTSQPLFAFEWRDPEMGISGQLTWTRLPQGFKNSPTLFNEALHRDLADFRIQHPDLILLQYVDDLLLAATSELDCQQGTRALLQTLGNLGYRASAKKAQICQKQVKYLGYLLKEGQRWLTEARKETVMGQPTPKTPRQLREFLGKAGFCRLFIPGFAEMAAPLYPLTKPGTLFNWGPDQQKAYQEIKQALLTAPALGLPDLTKPFELFVDEKQGYAKGVLTQKLGPWRRPVAYLSKKLDPVAAGWPPCLRMVAAIAVLTKDAGKLTMGQPLVILAPHAVEALVKQPPDRWLSNARMTHYQALLLDTDRVQFGPVVALNPATLLPLPEEGLQHNCLDILAEAHGTRPDLTDQPLPDADHTWYTDGSSLLQEGQRKAGAAVTTETEVIWAKALPAGTSAQRAELIALTQALKMAEGKKLNVYTDSRYAFATAHIHGEIYRRRGWLTSEGKEIKNKDEILALLKALFLPKRLSIIHCPGHQKGHSAEARGNRMADQAARKAAITETPDTSTLLIENSSPSGGSKRTADGSEFEPKKKRKV

SEQ ID NO: 135 - skipped

SEQ ID NO: 136 - protein, 19 aa, synthetic construct
  REGION 1..19: note = Synthetic
NLSKRPAAIKKAGQAKKKK

SEQ ID NO: 137 - protein, 1367 aa, Streptococcus pyogenes; identical to SEQ ID NO: 55

SEQ ID NO: 138 - skipped

SEQ ID NO: 139 - protein, 677 aa, synthetic construct; identical to SEQ ID NO: 122
  REGION 1..677: note = Synthetic

SEQ ID NO: 140 - skipped

SEQ ID NO: 141 - protein, 1367 aa, Streptococcus pyogenes; identical to SEQ ID NO: 55

SEQ ID NO: 142 - skipped

SEQ ID NO: 143 - protein, 677 aa, synthetic construct; identical to SEQ ID NO: 122
  REGION 1..677: note = Synthetic

SEQ ID NO: 144 - skipped

SEQ ID NO: 145 - protein, 2117 aa, synthetic construct
  REGION 1..2117: note = Synthetic
MKRTADGSEFESPKKKRKVTLNIEDEYRLHETSKEPDVSLGSTWLSDFPQAWAETGGMGLAVRQAPLIIPLKATSTPVSIKQYPMSQEARLGIKPHIQRLLDQGILVPCQSPWNTPLLPVKKPGTNDYRPVQDLREVNKRVEDIHPTVPNPYNLLSGLPPSHQWYTVLDLKDAFFCLRLHPTSQPLFAFEWRDPEMGISGQLTWTRLPQGFKNSPTLFDEALHRDLADFRIQHPDLILLQYVDDLLLAATSELDCQQGTRALLQTLGNLGYRASAKKAQICQKQVKYLGYLLKEGQRWLTEARKETVMGQPTPKTPRQLREFLGTAGFCRLWIPGFAEMAAPLYPLTKTGTLFNWGPDQQKAYQEIKQALLTAPALGLPDLTKPFELFVDEKQGYAKGVLTQKLGPWRRPVAYLSKKLDPVAAGWPPCLRMVAAIAVLTKDAGKLTMGQPLVILAPHAVEALVKQPPDRWLSNARMTHYQALLLDTDRVQFGPVVALNPATLLPLPEEGLQHNCLDILAEAHGTRPDLTDQPLPDADHTWYTDGSSLLQEGQRKAGAAVTTETEVIWAKALPAGTSAQRAELIALTQALKMAEGKKLNVYTDSRYAFATAHIHGEIYRRRGLLTSEGKEIKNKDEILALLKALFLPKRLSIIHCPGHQKGHSAEARGNRMADQAARKAAITETPDTSTLLIENSSPSGGSSGGSSGSETPGTSESATPESSGGSSGGSSDKKYSIGLDIGTNSVGWAVITDEYKVPSKKFKVLGNTDRHSIKKNLIGALLFDSGETAEATRLKRTARRRYTRRKNRICYLQEIFSNEMAKVDDSFFHRLEESFLVEEDKKHERHPIFGNIVDEVAYHEKYPTIYHLRKKLVDSTDKADLRLIYLALAHMIKFRGHFLIEGDLNPDNSDVDKLFIQLVQTYNQLFEENPINASGVDAKAILSARLSKSRRLENLIAQLPGEKKNGLFGNLIALSLGLTPNFKSNFDLAEDAKLQLSKDTYDDDLDNLLAQIGDQYADLFLAAKNLSDAILLSDILRVNTEITKAPLSASMIKRYDEHHQDLTLLKALVRQQLPEKYKEIFFDQSKNGYAGYIDGGASQEEFYKFIKPILEKMDGTEELLVKLNREDLLRKQRTFDNGSIPHQIHLGELHAILRRQEDFYPFLKDNREKIEKILTFRIPYYVGPLARGNSRFAWMTRKSEETITPWNFEEVVDKGASAQSFIERMTNFDKNLPNEKVLPKHSLLYEYFTVYNELTKVKYVTEGMRKPAFLSGEQKKAIVDLLFKTNRKVTVKQLKEDYFKKIECFDSVEISGVEDRFNASLGTYHDLLKIIKDKDFLDNEENEDILEDIVLTLTLFEDREMIEERLKTYAHLFDDKVMKQLKRRRYTGWGRLSRKLINGIRDKQSGKTILDFLKSDGFANRNFMQLIHDDSLTFKEDIQKAQVSGQGDSLHEHIANLAGSPAIKKGILQTVKVVDELVKVMGRHKPENIVIEMARENQTTQKGQKNSRERMKRIEEGIKELGSQILKEHPVENTQLQNEKLYLYYLQNGRDMYVDQELDINRLSDYDVDAIVPQSFLKDDSIDNKVLTRSDKNRGKSDNVPSEEVVKKMKNYWRQLLNAKLITQRKFDNLTKAERGGLSELDKAGFIKRQLVETRQITKHVAQILDSRMNTKYDENDKLIREVKVITLKSKLVSDFRKDFQFYKVREINNYHHAHDAYLNAVVGTALIKKYPKLESEFVYGDYKVYDVRKMIAKSEQEIGKATAKYFFYSNIMNFFKTEITLANGEIRKRPLIETNGETGEIVWDKGRDFATVRKVLSMPQVNIVKKTEVQTGGFSKESILPKRNSDKLIARKKDWDPKKYGGFDSPTVAYSVLVVAKVEKGKSKKLKSVKELLGITIMERSSFEKNPIDFLEAKGYKEVKKDLIIKLPKYSLFELENGRKRMLASAGELQKGNELALPSKYVNFLYLASHYEKLKGSPEDNEQKQLFVEQHKHYLDEIIEQISEFSKRVILADANLDKVLSAYNKHRDKPIREQAENIIHLFTLTNLGAPAAFKYFDTTIDRKRYTSTKEVLDATLIHQSITGLYETRIDLSQLGGDSGGSKRTADGSEFEPKKKRKV

SEQ ID NO: 146 - skipped

SEQ ID NO: 147 - protein, 1367 aa, Streptococcus pyogenes; identical to SEQ ID NO: 55

SEQ ID NO: 148 - skipped

SEQ ID NO: 149 - protein, 677 aa, unidentified; identical to SEQ ID NO: 89
  REGION 1..677: note = moloney murine leukemia virus

SEQ ID NO: 150 - protein, 2144 aa, synthetic construct
  REGION 1..2144: note = Synthetic
MKRTADGSEFESPKKKRKVTLNIEDEYRLHETSKEPDVSLGSTWLSDFPQAWAETGGMGLAVRQAPLIIPLKATSTPVSIKQYPMSQEARLGIKPHIQRLLDQGILVPCQSPWNTPLLPVKKPGTNDYRPVQDLREVNKRVEDIHPTVPNPYNLLSGLPPSHQWYTVLDLKDAFFCLRLHPTSQPLFAFEWRDPEMGISGQLTWTRLPQGFKNSPTLFDEALHRDLADFRIQHPDLILLQYVDDLLLAATSELDCQQGTRALLQTLGNLGYRASAKKAQICQKQVKYLGYLLKEGQRWLTEARKETVMGQPTPKTPRQLREFLGTAGFCRLWIPGFAEMAAPLYPLTKTGTLFNWGPDQQKAYQEIKQALLTAPALGLPDLTKPFELFVDEKQGYAKGVLTQKLGPWRRPVAYLSKKLDPVAAGWPPCLRMVAAIAVLTKDAGKLTMGQPLVILAPHAVEALVKQPPDRWLSNARMTHYQALLLDTDRVQFGPVVALNPATLLPLPEEGLQHNCLDILAEAHGTRPDLTDQPLPDADHTWYTDGSSLLQEGQRKAGAAVTTETEVIWAKALPAGTSAQRAELIALTQALKMAEGKKLNVYTDSRYAFATAHIHGEIYRRRGLLTSEGKEIKNKDEILALLKALFLPKRLSIIHCPGHQKGHSAEARGNRMADQAARKAAITETPDTSTLLIENSSPSGGSSGGSSGSETPGTSESATPESAGSYPYDVPDYAGSAAPAAKKKKLDGSGSGGSSGGSDKKYSIGLDIGTNSVGWAVITDEYKVPSKKFKVLGNTDRHSIKKNLIGALLFDSGETAEATRLKRTARRRYTRRKNRICYLQEIFSNEMAKVDDSFFHRLEESFLVEEDKKHERHPIFGNIVDEVAYHEKYPTIYHLRKKLVDSTDKADLRLIYLALAHMIKFRGHFLIEGDLNPDNSDVDKLFIQLVQTYNQLFEENPINASGVDAKAILSARLSKSRRLENLIAQLPGEKKNGLFGNLIALSLGLTPNFKSNFDLAEDAKLQLSKDTYDDDLDNLLAQIGDQYADLFLAAKNLSDAILLSDILRVNTEITKAPLSASMIKRYDEHHQDLTLLKALVRQQLPEKYKEIFFDQSKNGYAGYIDGGASQEEFYKFIKPILEKMDGTEELLVKLNREDLLRKQRTFDNGSIPHQIHLGELHAILRRQEDFYPFLKDNREKIEKILTFRIPYYVGPLARGNSRFAWMTRKSEETITPWNFEEVVDKGASAQSFIERMTNFDKNLPNEKVLPKHSLLYEYFTVYNELTKVKYVTEGMRKPAFLSGEQKKAIVDLLFKTNRKVTVKQLKEDYFKKIECFDSVEISGVEDRFNASLGTYHDLLKIIKDKDFLDNEENEDILEDIVLTLTLFEDREMIEERLKTYAHLFDDKVMKQLKRRRYTGWGRLSRKLINGIRDKQSGKTILDFLKSDGFANRNFMQLIHDDSLTFKEDIQKAQVSGQGDSLHEHIANLAGSPAIKKGILQTVKVVDELVKVMGRHKPENIVIEMARENQTTQKGQKNSRERMKRIEEGIKELGSQILKEHPVENTQLQNEKLYLYYLQNGRDMYVDQELDINRLSDYDVDAIVPQSFLKDDSIDNKVLTRSDKNRGKSDNVPSEEVVKKMKNYWRQLLNAKLITQRKFDNLTKAERGGLSELDKAGFIKRQLVETRQITKHVAQILDSRMNTKYDENDKLIREVKVITLKSKLVSDFRKDFQFYKVREINNYHHAHDAYLNAVVGTALIKKYPKLESEFVYGDYKVYDVRKMIAKSEQEIGKATAKYFFYSNIMNFFKTEITLANGEIRKRPLIETNGETGEIVWDKGRDFATVRKVLSMPQVNIVKKTEVQTGGFSKESILPKRNSDKLIARKKDWDPKKYGGFDSPTVAYSVLVVAKVEKGKSKKLKSVKELLGITIMERSSFEKNPIDFLEAKGYKEVKKDLIIKLPKYSLFELENGRKRMLASAGELQKGNELALPSKYVNFLYLASHYEKLKGSPEDNEQKQLFVEQHKHYLDEIIEQISEFSKRVILADANLDKVLSAYNKHRDKPIREQAENIIHLFTLTNLGAPAAFKYFDTTIDRKRYTSTKEVLDATLIHQSITGLYETRIDLSQLGGDSGGSKRTADGSEFEPKKKRKV

SEQ ID NO: 151-152 - skipped (2 entries)

SEQ ID NO: 153 - protein, 1367 aa, Streptococcus pyogenes; identical to SEQ ID NO: 55

SEQ ID NO: 154 - protein, 2529 aa, synthetic construct
  REGION 1..2529: note = Synthetic
MKRTADGSEFESPKKKRKVDKKYSIGLDIGTNSVGWAVITDEYKVPSKKFKVLGNTDRHSIKKNLIGALLFDSGETAEATRLKRTARRRYTRRKNRICYLQEIFSNEMAKVDDSFFHRLEESFLVEEDKKHERHPIFGNIVDEVAYHEKYPTIYHLRKKLVDSTDKADLRLIYLALAHMIKFRGHFLIEGDLNPDNSDVDKLFIQLVQTYNQLFEENPINASGVDAKAILSARLSKSRRLENLIAQLPGEKKNGLFGNLIALSLGLTPNFKSNFDLAEDAKLQLSKDTYDDDLDNLLAQIGDQYADLFLAAKNLSDAILLSDILRVNTEITKAPLSASMIKRYDEHHQDLTLLKALVRQQLPEKYKEIFFDQSKNGYAGYIDGGASQEEFYKFIKPILEKMDGTEELLVKLNREDLLRKQRTFDNGSIPHQIHLGELHAILRRQEDFYPFLKDNREKIEKILTFRIPYYVGPLARGNSRFAWMTRKSEETITPWNFEEVVDKGASAQSFIERMTNFDKNLPNEKVLPKHSLLYEYFTVYNELTKVKYVTEGMRKPAFLSGEQKKAIVDLLFKTNRKVTVKQLKEDYFKKIECFDSVEISGVEDRFNASLGTYHDLLKIIKDKDFLDNEENEDILEDIVLTLTLFEDREMIEERLKTYAHLFDDKVMKQLKRRRYTGWGRLSRKLINGIRDKQSGKTILDFLKSDGFANRNFMQLIHDDSLTFKEDIQKAQVSGQGDSLHEHIANLAGSPAIKKGILQTVKVVDELVKVMGRHKPENIVIEMARENQTTQKGQKNSRERMKRIEEGIKELGSQILKEHPVENTQLQNEKLYLYYLQNGRDMYVDQELDINRLSDYDVDAIVPQSFLKDDSIDNKVLTRSDKNRGKSDNVPSEEVVKKMKNYWRQLLNAKLITQRKFDNLTKAERGGLSELDKAGFIKRQLVETRQITKHVAQILDSRMNTKYDENDKLIREVKVITLKSKLVSDFRKDFQFYKVREINNYHHAHDAYLNAVVGTALIKKYPKLESEFVYGDYKVYDVRKMIAKSEQEIGKATAKYFFYSNIMNFFKTEITLANGEIRKRPLIETNGETGEIVWDKGRDFATVRKVLSMPQVNIVKKTEVQTGGFSKESILPKRNSDKLIARKKDWDPKKYGGFDSPTVAYSVLVVAKVEKGKSKKLKSVKELLGITIMERSSFEKNPIDFLEAKGYKEVKKDLIIKLPKYSLFELENGRKRMLASAGELQKGNELALPSKYVNFLYLASHYEKLKGSPEDNEQKQLFVEQHKHYLDEIIEQISEFSKRVILADANLDKVLSAYNKHRDKPIREQAENIIHLFTLTNLGAPAAFKYFDTTIDRKRYTSTKEVLDATLIHQSITGLYETRIDLSQLGGDSGGSSGGSSGSETPGTSESATPESSGGSSGGSSGIQGLAKLIADVAPSAIRENDIKSYFGRKVAIDASMSIYQFLIAVRQGGDVLQNEEGETTSHLMGMFYRTIRMMENGIKPVYVFDGKPPQLKSGELAKRSERRAEAEKQLQQAQAAGAEQEVEKFTKRLVKVTKQHNDECKHLLSLMGIPYLDAPSEAEASCAALVKAGKVYAAATEDMDCLTFGSPVLMRHLTASEAKKLPIQEFHLSRILQELGLNQEQFVDLCILLGSDYCESIRGIGPKRAVDLIQKHKSIEEIVRRLDPNKYPVPENWLHKEAHQLFLEPEVLDPESVELKWSEPNEEELIKFMCGEKQFSEERIRSGVKRLSKSRQGSTQGRLDDFFKVTGSLSSAKRKEPEPKGSTKKKAKTGAAGKFKRGKSGGSSGGSSGSETPGTSESATPESSGGSSGGSSTLNIEDEYRLHETSKEPDVSLGSTWLSDFPQAWAETGGMGLAVRQAPLIIPLKATSTPVSIKQYPMSQEARLGIKPHIQRLLDQGILVPCQSPWNTPLLPVKKPGTNDYRPVQDLREVNKRVEDIHPTVPNPYNLLSGLPPSHQWYTVLDLKDAFFCLRLHPTSQPLFAFEWRDPEMGISGQLTWTRLPQGFKNSPTLFNEALHRDLADFRIQHPDLILLQYVDDLLLAATSELDCQQGTRALLQTLGNLGYRASAKKAQICQKQVKYLGYLLKEGQRWLTEARKETVMGQPTPKTPRQLREFLGKAGFCRLFIPGFAEMAAPLYPLTKPGTLFNWGPDQQKAYQEIKQALLTAPALGLPDLTKPFELFVDEKQGYAKGVLTQKLGPWRRPVAYLSKKLDPVAAGWPPCLRMVAAIAVLTKDAGKLTMGQPLVILAPHAVEALVKQPPDRWLSNARMTHYQALLLDTDRVQFGPVVALNPATLLPLPEEGLQHNCLDILAEAHGTRPDLTDQPLPDADHTWYTDGSSLLQEGQRKAGAAVTTETEVIWAKALPAGTSAQRAELIALTQALKMAEGKKLNVYTDSRYAFATAHIHGEIYRRRGWLTSEGKEIKNKDEILALLKALFLPKRLSIIHCPGHQKGHSAEARGNRMADQAARKAAITETPDTSTLLIENSSPSGGSKRTADGSEFEPKKKRKV

SEQ ID NO: 155-156 - skipped (2 entries)

SEQ ID NO: 157 - protein, 1367 aa, Streptococcus pyogenes; identical to SEQ ID NO: 55

SEQ ID NO: 158 - skipped

SEQ ID NO: 159 - protein, 677 aa, synthetic construct; identical to SEQ ID NO: 122
  REGION 1..677: note = Synthetic

SEQ ID NO: 160 - skipped

SEQ ID NO: 161 - protein, 379 aa, synthetic construct
  REGION 1..379: note = Synthetic
GIQGLAKLIADVAPSAIRENDIKSYFGRKVAIDASMSIYQFLIAVRQGGDVLQNEEGETTSHLMGMFYRTIRMMENGIKPVYVFDGKPPQLKSGELAKRSERRAEAEKQLQQAQAAGAEQEVEKFTKRLVKVTKQHNDECKHLLSLMGIPYLDAPSEAEASCAALVKAGKVYAAATEDMDCLTFGSPVLMRHLTASEAKKLPIQEFHLSRILQELGLNQEQFVDLCILLGSDYCESIRGIGPKRAVDLIQKHKSIEEIVRRLDPNKYPVPENWLHKEAHQLFLEPEVLDPESVELKWSEPNEEELIKFMCGEKQFSEERIRSGVKRLSKSRQGSTQGRLDDFFKVTGSLSSAKRKEPEPKGSTKKKAKTGAAGKFKRGK

SEQ ID NO: 162 - protein, 1803 aa, synthetic construct
  REGION 1..1803: note = Synthetic
MKRTADGSEFESPKKKRKVGKRNYILGLDIGITSVGYGIIDYETRDVIDAGVRLFKEANVENNEGRRSKRGARRLKRRRRHRIQRVKKLLFDYNLLTDHSELSGINPYEARVKGLSQKLSEEEFSAALLHLAKRRGVHNVNEVEEDTGNELSTKEQISRNSKALEEKYVAELQLERLKKDGEVRGSINRFKTSDYVKEAKQLLKVQKAYHQLDQSFIDTYIDLLETRRTYYEGPGEGSPFGWKDIKEWYEMLMGHCTYFPEELRSVKYAYNADLYNALNDLNNLVITRDENEKLEYYEKFQIIENVFKQKKKPTLKQIAKEILVNEEDIKGYRVTSTGKPEFTNLKVYHDIKDITARKEIIENAELLDQIAKILTIYQSSEDIQEELTNLNSELTQEEIEQISNLKGYTGTHNLSLKAINLILDELWHTNDNQIAIFNRLKLVPKKVDLSQQKEIPTTLVDDFILSPVVKRSFIQSIKVINAIIKKYGLPNDIIIELAREKNSKDAQKMINEMQKRNRQTNERIEEIIRTTGKENAKYLIEKIKLHDMQEGKCLYSLEAIPLEDLLNNPFNYEVDHIIPRSVSFDNSFNNKVLVKQEEASKKGNRTPFQYLSSSDSKISYETFKKHILNLAKGKGRISKTKKEYLLEERDINRFSVQKDFINRNLVDTRYATRGLMNLLRSYFRVNNLDVKVKSINGGFTSFLRRKWKFKKERNKGYKHHAEDALIIANADFIFKEWKKLDKAKKVMENQMFEEKQAESMPEIETEQEYKEIFITPHQIKHIKDFKDYKYSHRVDKKPNRELINDTLYSTRKDDKGNTLIVNNLNGLYDKDNDKLKKLINKSPEKLLMYHHDPQTYQKLKLIMEQYGDEKNPLYKYYEETGNYLTKYSKKDNGPVIKKIKYYGNKLNAHLDITDDYPNSRNKVVKLSLKPYRFDVYLDNGVYKFVTVKNLDVIKKENYYEVNSKCYEEAKKLKKISNQAEFIASFYNNDLIKINGELYRVIGVNNDLLNRIEVNMIDITYREYLENMNDKRPPRIIKTIASKTQSIKKYSTDILGNLYEVKSKKHPQIIKKGSGGSSGGSSGSETPGTSESATPESSGGSSGGSSTLNIEDEYRLHETSKEPDVSLGSTWLSDFPQAWAETGGMGLAVRQAPLIIPLKATSTPVSIKQYPMSQEARLGIKPHIQRLLDQGILVPCQSPWNTPLLPVKKPGTNDYRPVQDLREVNKRVEDIHPTVPNPYNLLSGLPPSHQWYTVLDLKDAFFCLRLHPTSQPLFAFEWRDPEMGISGQLTWTRLPQGFKNSPTLFDEALHRDLADFRIQHPDLILLQYVDDLLLAATSELDCQQGTRALLQTLGNLGYRASAKKAQICQKQVKYLGYLLKEGQRWLTEARKETVMGQPTPKTPRQLREFLGTAGFCRLWIPGFAEMAAPLYPLTKTGTLFNWGPDQQKAYQEIKQALLTAPALGLPDLTKPFELFVDEKQGYAKGVLTQKLGPWRRPVAYLSKKLDPVAAGWPPCLRMVAAIAVLTKDAGKLTMGQPLVILAPHAVEALVKQPPDRWLSNARMTHYQALLLDTDRVQFGPVVALNPATLLPLPEEGLQHNCLDILAEAHGTRPDLTDQPLPDADHTWYTDGSSLLQEGQRKAGAAVTTETEVIWAKALPAGTSAQRAELIALTQALKMAEGKKLNVYTDSRYAFATAHIHGEIYRRRGLLTSEGKEIKNKDEILALLKALFLPKRLSIIHCPGHQKGHSAEARGNRMADQAARKAAITETPDTSTLLIENSSPSGGSKRTADGSEFEPKKKRKV

SEQ ID NO: 163 - protein, 2117 aa, synthetic construct
  REGION 1..2117: note = Synthetic
MKRTADGSEFESPKKKRKVDKKYSIGLDIGTNSVGWAVITDEYKVPSKKFKVLGNTDRHSIKKNLIGALLFDSGETAEATRLKRTARRRYTRRKNRICYLQEIFSNEMAKVDDSFFHRLEESFLVEEDKKHERHPIFGNIVDEVAYHEKYPTIYHLRKKLVDSTDKADLRLIYLALAHMIKFRGHFLIEGDLNPDNSDVDKLFIQLVQTYNQLFEENPINASGVDAKAILSARLSKSRRLENLIAQLPGEKKNGLFGNLIALSLGLTPNFKSNFDLAEDAKLQLSKDTYDDDLDNLLAQIGDQYADLFLAAKNLSDAILLSDILRVNTEITKAPLSASMIKRYDEHHQDLTLLKALVRQQLPEKYKEIFFDQSKNGYAGYIDGGASQEEFYKFIKPILEKMDGTEELLVKLNREDLLRKQRTFDNGSIPHQIHLGELHAILRRQEDFYPFLKDNREKIEKILTFRIPYYVGPLARGNSRFAWMTRKSEETITPWNFEEVVDKGASAQSFIERMTNFDKNLPNEKVLPKHSLLYEYFTVYNELTKVKYVTEGMRKPAFLSGEQKKAIVDLLFKTNRKVTVKQLKEDYFKKIECFDSVEISGVEDRFNASLGTYHDLLKIIKDKDFLDNEENEDILEDIVLTLTLFEDREMIEERLKTYAHLFDDKVMKQLKRRRYTGWGRLSRKLINGIRDKQSGKTILDFLKSDGFANRNFMQLIHDDSLTFKEDIQKAQVSGQGDSLHEHIANLAGSPAIKKGILQTVKVVDELVKVMGRHKPENIVIEMARENQTTQKGQKNSRERMKRIEEGIKELGSQILKEHPVENTQLQNEKLYLYYLQNGRDMYVDQELDINRLSDYDVDAIVPQSFLKDDSIDNKVLTRSDKNRGKSDNVPSEEVVKKMKNYWRQLLNAKLITQRKFDNLTKAERGGLSELDKAGFIKRQLVETRQITKHVAQILDSRMNTKYDENDKLIREVKVITLKSKLVSDFRKDFQFYKVREINNYHHAHDAYLNAVVGTALIKKYPKLESEFVYGDYKVYDVRKMIAKSEQEIGKATAKYFFYSNIMNFFKTEITLANGEIRKRPLIETNGETGEIVWDKGRDFATVRKVLSMPQVNIVKKTEVQTGGFSKESILPKRNSDKLIARKKDWDPKKYGGFVSPTVAYSVLVVAKVEKGKSKKLKSVKELLGITIMERSSFEKNPIDFLEAKGYKEVKKDLIIKLPKYSLFELENGRKRMLASARELQKGNELALPSKYVNFLYLASHYEKLKGSPEDNEQKQLFVEQHKHYLDEIIEQISEFSKRVILADANLDKVLSAYNKHRDKPIREQAENIIHLFTLTNLGAPAAFKYFDTTIDRKQYRSTKEVLDATLIHQSITGLYETRIDLSQLGGDSGGSSGGSSGSETPGTSESATPESSGGSSGGSSTLNIEDEYRLHETSKEPDVSLGSTWLSDFPQAWAETGGMGLAVRQAPLIIPLKATSTPVSIKQYPMSQEARLGIKPHIQRLLDQGILVPCQSPWNTPLLPVKKPGTNDYRPVQDLREVNKRVEDIHPTVPNPYNLLSGLPPSHQWYTVLDLKDAFFCLRLHPTSQPLFAFEWRDPEMGISGQLTWTRLPQGFKNSPTLFNEALHRDLADFRIQHPDLILLQYVDDLLLAATSELDCQQGTRALLQTLGNLGYRASAKKAQICQKQVKYLGYLLKEGQRWLTEARKETVMGQPTPKTPRQLREFLGKAGFCRLFIPGFAEMAAPLYPLTKPGTLFNWGPDQQKAYQEIKQALLTAPALGLPDLTKPFELFVDEKQGYAKGVLTQKLGPWRRPVAYLSKKLDPVAAGWPPCLRMVAAIAVLTKDAGKLTMGQPLVILAPHAVEALVKQPPDRWLSNARMTHYQALLLDTDRVQFGPVVALNPATLLPLPEEGLQHNCLDILAEAHGTRPDLTDQPLPDADHTWYTDGSSLLQEGQRKAGAAVTTETEVIWAKALPAGTSAQRAELIALTQALKMAEGKKLNVYTDSRYAFATAHIHGEIYRRRGWLTSEGKEIKNKDEILALLKALFLPKRLSIIHCPGHQKGHSAEARGNRMADQAARKAAITETPDTSTLLIENSSPSGGSKRTADGSEFEPKKKRKV

SEQ ID NO: 164 - protein, 2117 aa, unidentified
  REGION 1..2117: note = moloney murine leukemia virus
MKRTADGSEFESPKKKRKVDKKYSIGLDIGTNSVGWAVITDEYKVPSKKFKVLGNTDRHSIKKNLIGALLFDSGETAEATRLKRTARRRYTRRKNRICYLQEIFSNEMAKVDDSFFHRLEESFLVEEDKKHERHPIFGNIVDEVAYHEKYPTIYHLRKKLVDSTDKADLRLIYLALAHMIKFRGHFLIEGDLNPDNSDVDKLFIQLVQTYNQLFEENPINASGVDAKAILSARLSKSRRLENLIAQLPGEKKNGLFGNLIALSLGLTPNFKSNFDLAEDAKLQLSKDTYDDDLDNLLAQIGDQYADLFLAAKNLSDAILLSDILRVNTEITKAPLSASMIKRYDEHHQDLTLLKALVRQQLPEKYKEIFFDQSKNGYAGYIDGGASQEEFYKFIKPILEKMDGTEELLVKLNREDLLRKQRTFDNGSIPHQIHLGELHAILRRQEDFYPFLKDNREKIEKILTFRIPYYVGPLARGNSRFAWMTRKSEETITPWNFEEVVDKGASAQSFIERMTNFDKNLPNEKVLPKHSLLYEYFTVYNELTKVKYVTEGMRKPAFLSGEQKKAIVDLLFKTNRKVTVKQLKEDYFKKIECFDSVEISGVEDRFNASLGTYHDLLKIIKDKDFLDNEENEDILEDIVLTLTLFEDREMIEERLKTYAHLFDDKVMKQLKRRRYTGWGRLSRKLINGIRDKQSGKTILDFLKSDGFANRNFMQLIHDDSLTFKEDIQKAQVSGQGDSLHEHIANLAGSPAIKKGILQTVKVVDELVKVMGRHKPENIVIEMARENQTTQKGQKNSRERMKRIEEGIKELGSQILKEHPVENTQLQNEKLYLYYLQNGRDMYVDQELDINRLSDYDVDAIVPQSFLKDDSIDNKVLTRSDKNRGKSDNVPSEEVVKKMKNYWRQLLNAKLITQRKFDNLTKAERGGLSELDKAGFIKRQLVETRQITKHVAQILDSRMNTKYDENDKLIREVKVITLKSKLVSDFRKDFQFYKVREINNYHHAHDAYLNAVVGTALIKKYPKLESEFVYGDYKVYDVRKMIAKSEQEIGKATAKYFFYSNIMNFFKTEITLANGEIRKRPLIETNGETGEIVWDKGRDFATVRKVLSMPQVNIVKKTEVQTGGFSKESILPKRNSDKLIARKKDWDPKKYGGFVSPTVAYSVLVVAKVEKGKSKKLKSVKELLGITIMERSSFEKNPIDFLEAKGYKEVKKDLIIKLPKYSLFELENGRKRMLASARELQKGNELALPSKYVNFLYLASHYEKLKGSPEDNEQKQLFVEQHKHYLDEIIEQISEFSKRVILADANLDKVLSAYNKHRDKPIREQAENIIHLFTLTNLGAPAAFKYFDTTIDRKEYRSTKEVLDATLIHQSITGLYETRIDLSQLGGDSGGSSGGSSGSETPGTSESATPESSGGSSGGSSTLNIEDEYRLHETSKEPDVSLGSTWLSDFPQAWAETGGMGLAVRQAPLIIPLKATSTPVSIKQYPMSQEARLGIKPHIQRLLDQGILVPCQSPWNTPLLPVKKPGTNDYRPVQDLREVNKRVEDIHPTVPNPYNLLSGLPPSHQWYTVLDLKDAFFCLRLHPTSQPLFAFEWRDPEMGISGQLTWTRLPQGFKNSPTLFNEALHRDLADFRIQHPDLILLQYVDDLLLAATSELDCQQGTRALLQTLGNLGYRASAKKAQICQKQVKYLGYLLKEGQRWLTEARKETVMGQPTPKTPRQLREFLGKAGFCRLFIPGFAEMAAPLYPLTKPGTLFNWGPDQQKAYQEIKQALLTAPALGLPDLTKPFELFVDEKQGYAKGVLTQKLGPWRRPVAYLSKKLDPVAAGWPPCLRMVAAIAVLTKDAGKLTMGQPLVILAPHAVEALVKQPPDRWLSNARMTHYQALLLDTDRVQFGPVVALNPATLLPLPEEGLQHNCLDILAEAHGTRPDLTDQPLPDADHTWYTDGSSLLQEGQRKAGAAVTTETEVIWAKALPAGTSAQRAELIALTQALKMAEGKKLNVYTDSRYAFATAHIHGEIYRRRGWLTSEGKEIKNKDEILALLKALFLPKRLSIIHCPGHQKGHSAEARGNRMADQAARKAAITETPDTSTLLIENSSPSGGSKRTADGSEFEPKKKRKV

SEQ ID NO: 165 - protein, 150 aa, synthetic construct
  REGION 1..150: note = Synthetic
  REGION 6..150: note = May be absent
GGGGSGGGGSGGGGSGGGGSGGGGSGGGGSGGGGSGGGGSGGGGSGGGGSGGGGSGGGGSGGGGSGGGGSGGGGSGGGGSGGGGSGGGGSGGGGSGGGGSGGGGSGGGGSGGGGSGGGGSGGGGSGGGGSGGGGSGGGGSGGGGSGGGGS

SEQ ID NO: 166 - protein, 30 aa, synthetic construct
  REGION 1..30: note = Synthetic
  REGION 2..30: note = May be absent
GGGGGGGGGGGGGGGGGGGGGGGGGGGGGG

SEQ ID NO: 167 - protein, 150 aa, synthetic construct
  REGION 1..150: note = Synthetic
  REGION 6..150: note = May be absent
EAAAKEAAAKEAAAKEAAAKEAAAKEAAAKEAAAKEAAAKEAAAKEAAAKEAAAKEAAAKEAAAKEAAAKEAAAKEAAAKEAAAKEAAAKEAAAKEAAAKEAAAKEAAAKEAAAKEAAAKEAAAKEAAAKEAAAKEAAAKEAAAKEAAAK

SEQ ID NO: 168 - protein, 90 aa, synthetic construct
  REGION 1..90: note = Synthetic
  REGION 4..90: note = May be absent
GGSGGSGGSGGSGGSGGSGGSGGSGGSGGSGGSGGSGGSGGSGGSGGSGGSGGSGGSGGSGGSGGSGGSGGSGGSGGSGGSGGSGGSGGS

SEQ ID NO: 169 - protein, 120 aa, synthetic construct
  REGION 1..120: note = Synthetic
  REGION 5..120: note = May be absent
SGGSSGGSSGGSSGGSSGGSSGGSSGGSSGGSSGGSSGGSSGGSSGGSSGGSSGGSSGGSSGGSSGGSSGGSSGGSSGGSSGGSSGGSSGGSSGGSSGGSSGGSSGGSSGGSSGGSSGGS

SEQ ID NO: 170 - protein, 60 aa, synthetic construct
  REGION 1..60: note = Synthetic
  REGION 3..60: note = May be absent
XPXPXPXPXPXPXPXPXPXPXPXPXPXPXPXPXPXPXPXPXPXPXPXPXPXPXPXPXPXP

SEQ ID NO: 171 - protein, 16 aa, synthetic construct
  REGION 1..16: note = Synthetic
SGSETPGTSESATPES

SEQ ID NO: 172 - protein, 32 aa, synthetic construct
  REGION 1..32: note = Synthetic
SGGSSGGSSGSETPGTSESATPESSGGSSGGS

SEQ ID NO: 173 - protein, 10 aa, synthetic construct
  REGION 1..10: note = Synthetic
SGGSGGSGGS

SEQ ID NO: 174 - protein, 4 aa, synthetic construct
  REGION 1..4: note = Synthetic
SGGS

SEQ ID NO: 175 - protein, 60 aa, synthetic construct
  REGION 1..60: note = Synthetic
SGGSSGGSSGSETPGTSESATPESAGSYPYDVPDYAGSAAPAAKKKKLDGSGSGGSSGGS

SEQ ID NO: 176 - protein, 21 aa, synthetic construct
  REGION 1..21: note = Synthetic
GGSGGSGGSGGSGGSGGSGGS

SEQ ID NO: 177-189 - skipped (13 entries)

SEQ ID NO: 190 - protein, 20 aa, synthetic construct
  REGION 1..20: note = Synthetic
AVKRPAATKKAGQAKKKKLD

SEQ ID NO: 191 - protein, 25 aa, synthetic construct
  REGION 1..25: note = Synthetic
MSRRRKANPTKLSENAKKLAKEVEN

SEQ ID NO: 192 - protein, 9 aa, synthetic construct
  REGION 1..9: note = Synthetic
PAAKRVKLD

SEQ ID NO: 193 - protein, 9 aa, synthetic construct
  REGION 1..9: note = Synthetic
KLKIKRPVK

SEQ ID NO: 194 - protein, 8 aa, synthetic construct
  REGION 1..8: note = Synthetic
VSRKRPRP

SEQ ID NO: 195 - protein, 10 aa, synthetic construct
  REGION 1..10: note = Synthetic
EGAPPAKRAR

SEQ ID NO: 196 - protein, 12 aa, synthetic construct
  REGION 1..12: note = Synthetic
PPQPKKKPLDGE

SEQ ID NO: 197 - skipped

SEQ ID NO: 198 - protein, 380 aa, Homo sapiens; identical to SEQ ID NO: 7

SEQ ID NO: 199 - protein, 380 aa, synthetic construct
  REGION 1..380: note = Synthetic
MGIQGLAKLIADVAPSAIRENDIKSYFGRKVAIDASMSIYQFLIAVRQGGDVLQNEEGETTSHLMGMFYRTIRMMENGIKPVYVFDGKPPQLKSGELAKRSERRAEAEKQLQQAQAAGAEQEVEKFTKRLVKVTKQHNDECKHLLSLMGIPYLDAPSEAEASCAALVRAGKVYAAATEDMDCLTFGSPVLMRHLTASEAKKLPIQEFHLSRILQELGLNQEQFVDLCILLGSDYCESIRGIGPKRAVDLIQKHKSIEEIVRRLDPNKYPVPENWLHKEAHQLFLEPEVLDPESVELKWSEPNEEELIKFMCGEKQFSEERIRSGVKRLSKSRQGSTQGRLDDFFKVTGSLSSAKRKEPEPKGSTKKKAKTGAAGKFKRGK

SEQ ID NO: 200 - protein, 380 aa, synthetic construct
  REGION 1..380: note = Synthetic
MGIQGLAKLIADVAPSAIRENDIKSYFGRKVAIDASMSIYQFLIAVRQGGDVLQNEEGETTSHLMGMFYRTIRMMENGIKPVYVFDGKPPQLKSGELAKRSERRAEAEKQLQQAQAAGAEQEVEKFTKRLVKVTKQHNDECKHLLSLMGIPYLDAPSEAEASCAALVKAGKVYAAATEDMDCLTFGAPVLMRHLTASEAKKLPIQEFHLSRILQELGLNQEQFVDLCILLGSDYCESIRGIGPKRAVDLIQKHKSIEEIVRRLDPNKYPVPENWLHKEAHQLFLEPEVLDPESVELKWSEPNEEELIKFMCGEKQFSEERIRSGVKRLSKSRQGSTQGRLDDFFKVTGSLSSAKRKEPEPKGSTKKKAKTGAAGKFKRGK

SEQ ID NO: 201 - protein, 380 aa, synthetic construct
  REGION 1..380: note = Synthetic
MGIQGLAKLIADVAPSAIRENDIKSYFGRKVAIDASMSIYQFLIAVRQGGDVLQNEEGETTSHLMGMFYRTIRMMENGIKPVYVFDGKPPQLKSGELAKRSERRAEAEKQLQQAQAAGAEQEVEKFTKRLVKVTKQHNDECKHLLSLMGIPYLDAPSEAEASCAALVKAGKVYAAATEDMDCLTFGSPVLMRHLTASEAKKLPIQEFHLSRILQELGLNQEQFVDLCILLGSDYCESIRGIGPKRAVDLIQKHKSIEEIVRRLDPNKYPVPENWLHKEAHQLFLEPEVLDPESVELKWSEPNEEELIKFMCGEKQFSEERIRSGVKRLSKSRQGSTQGRLDDFFKVTGSLSSARRKEPEPKGSTKKKAKTGAAGKFKRGK

SEQ ID NO: 202 - protein, 908 aa, synthetic construct
  REGION 1..908: note = Synthetic
MGVNDLWQILEPVKQHIPLRNLGGKTIAVDLSLWVCEAQTVKKMMGSVMKPHLRNLFFRISYLTQMDVKLVFVMEGEPPKLKADVISKRNQSRYGSSGKSWSQKTGRSHFKSVLRECLHMLECLGIPWVQAAGEAEAMCAYLNAGGHVDGCLTNDGDTFLYGAQTVYRNFTMNTKDPHVDCYTMSSIKSKLGLDRDALVGLAILLGCDYLPKGVPGVGKEQALKLIQILKGQSLLQRFNRWNETSCNSSPQLLVTKKLAHCSVCSHPGSPKDHERNGCRLCKSDKYCEPHDYEYCCPCEWHRTEHDRQLSEVENNIKKKACCCEGFPFHEVIQEFLLNKDKLVKVIRYQRPDLLLFQRFTLEKMEWPNHYACEKLLVLLTHYDMIERKLGSRNSNQLQPIRIVKTRIRNGVHCFEIEWEKPEHYAMEDKQHGEFALLTIEEESLFEAAYPEIVAVYQKQKLEIKGKKQKRIKPKENNLPEPDEVMSFQSHMTLKPTCEIFHKQNSKLNSGISPDPTLPQESISASLNSLLLPKNTPCLNAQEQFMSSLRPLAIQQIKAVSKSLISESSQPNTSSHNISVIADLHLSTIDWEGTSFSNSPAIQRNTFSHDLKSEVESELSAIPDGFENIPEQLSCESERYTANIKKVLDEDSDGISPEEHLLSGITDLCLQDLPLKERIFTKLSYPQDNLQPDVNLKTLSILSVKESCIANSGSDCTSHLSKDLPGIPLQNESRDSKILKGDQLLQEDYKVNTSVPYSVSNTVVKTCNVRPPNTALDHSRKVDMQTTRKILMKKSVCLDRHSSDEQSAPVFGKAKYTTQRMKHSSQKHNSSHFKESGHNKLSSPKIHIKETEQCVRSYETAENEESCFPDSTKSSLSSLQCHKKENNSGTCLDSPLPLRQRLKLRFQST

SEQ ID NO: 203 - protein, 1186 aa, synthetic construct
  REGION 1..1186: note = Synthetic
MGVQGLWKLLECSGRQVSPEALEGKILAVDISIWLNQALKGVRDRHGNSIENPHLLTLFHRLCKLLFFRIRPIFVFDGDAPLLKKQTLVKRRQRKDLASSDSRKTTEKLLKTFLKRQAIKTAFRSKRDEALPSLTQVRRENDLYVLPPLQEEEKHSSEEEDEKEWQERMNQKQALQEEFFHNPQAIDIESEDFSSLPPEVKHEILTDMKEFTKRRRTLFEAMPEESDDFSQYQLKGLLKKNYLNQHIEHVQKEMNQQHSGHIRRQYEDEGGFLKEVESRRVVSEDTSHYILIKGIQAKTVAEVDSESLPSSSKMHGMSFDVKSSPCEKLKTEKEPDATPPSPRTLLAMQAALLGSSSEEELESENRRQARGRNAPAAVDEGSISPRTLSAIKRALDDDEDVKVCAGDDVQTGGPGAEEMRINSSTENSDEGLKVRDGKGIPFTATLASSSVNSAEEHVASTNEGREPTDSVPKEQMSLVHVGTEAFPISDESMIKDRKDRLPLESAVVRHSDAPGLPNGRELTPASPTCTNSVSKNETHAEVLEQQNELCPYESKFDSSLLSSDDETKCKPNSASEVIGPVSLQETSSIVSVPSEAVDNVENVVSFNAKEHENFLETIQEQQTTESAGQDLISIPKAVEPMEIDSEESESDGSFIEVQSVISDEELQAEFPETSKPPSEQGEEELVGTREGEAPAESESLLRDNSERDDVDGEPQEAEKDAEDSLHEWQDINLEELETLESNLLAQQNSLKAQKQQQERIAATVTGQMFLESQELLRLFGIPYIQAPMEAEAQCAILDLTDQTSGTITDDSDIWLFGARHVYRNFFNKNKFVEYYQYVDFHNQLGLDRNKLINLAYLLGSDYTEGIPTVGCVTAMEILNEFPGHGLEPLLKFSEWWHEAQKNPKIRPNPHDTKVKKKLRTLQLTPGFPNPAVAEAYLKPVVDDSKGSFLWGKPDLDKIREFCQRYFGWNRTKTDESLFPVLKQLDAQQTQLRIDSFFRLAQQEKEDAKRIKSQRLNRAVTCMLRKEKEAAASEIEAVSVAMEKEFELLDKAKRKTQKRGITNTLEESSSLKRKRLSDSKRKNTCGGFLGETCLSESSDGSSSEDAESSSLMNVQRRTAAKEPKTSASDSQNSVKEAPVKNGGATTSSSSDSDDDGGKEKMVLVTARSVFGKKRRKLRRARGRKRKT

SEQ ID NO: 204-215 - skipped (12 entries)

SEQ ID NO: 216 - DNA, 125 bp, synthetic construct
  source 1..125: mol_type = other DNA
nnnnnnnngtttttgtactctcaagatttagaaataaatcttgcagaagctacaaagataaggcttcatgccgaaatcaacaccctgtcattttatggcagggtgttttcgttatttaatttttt

SEQ ID NO: 217 - DNA, 121 bp, synthetic construct
  source 1..121: mol_type = other DNA
nnnnnnnnnnnnnnnnnngtttttgtactctcagaaatgcagaagctacaaagataaggcttcatgccgaaatcaacaccctgtcattttatggcagggtgttttcgttatttaatttttt

SEQ ID NO: 218 - DNA, 109 bp, synthetic construct
  source 1..109: mol_type = other DNA
nnnnnnnnnnnnnnnnnnnngtttttgtactctcagaaatgcagaagctacaaagataaggcttcatgccgaaatcaacaccctgtcattttatggcagggtgtttttt

SEQ ID NO: 219 - DNA, 102 bp, synthetic construct
  source 1..102: mol_type = other DNA
nnnnnnnnnnnnnnnnnnnngttttagagctagaaatagcaagttaaaataaggctagtccgttatcaacttgaaaaagtggcaccgagtcggtgctttttt

SEQ ID NO: 220 - DNA, 88 bp, synthetic construct
  source 1..88: mol_type = other DNA
nnnnnnnnnnnnnnnnnnnngttttagagctagaaatagcaagttaaaataaggctagtccgttatcaacttgaaaaagtgttttttt

SEQ ID NO: 221 - DNA, 76 bp, synthetic construct
  source 1..76: mol_type = other DNA
nnnnnnnnnnnnnnnnnnnngttttagagctagaaatagcaagttaaaataaggctagtccgttatcatttttttt

SEQ ID NO: 222 - RNA, 82 nt, synthetic construct
  source 1..82: mol_type = other RNA
gttttagagctagaaatagcaagttaaaataaaggctagtccgttatcaacttgaaaaagtggcaccgagtcggtgcttttt

SEQ ID NO: 223 - DNA, 905 bp, synthetic construct
  source 1..905: mol_type = other DNA
tagttattaatagtaatcaattacggggtcattagttcatagcccatatatggagttccgcgttacataacttacggtaaatggcccgcctggctgaccgcccaacgacccccgcccattgacgtcaataatgacgtatgttcccatagtaacgccaatagggactttccattgacgtcaatgggtggagtatttacggtaaactgcccacttggcagtacatcaagtgtatcatatgccaagtacgccccctattgacgtcaatgacggtaaatggcccgcctggcattatgcccagtacatgaccttatgggactttcctacttggcagtacatctacgtattagtcatcgctattaccatggtgatgcggttttggcagtacatcaatgggcgtggatagcggtttgactcacggggatttccaagtctccaccccattgacgtcaatgggagtttgttttggcaccaaaatcaacgggactttccaaaatgtcgtaacaactccgccccattgacgcaaatgggcggtaggcgtgtacggtgggaggtctatataagcagagctggtttagtgaaccgtcagatcgttcactgccgtataggcagggcccagactgagcacgtgagttttagagctagaaatagcaagttaaaataaggctagtccgttatcaacttgaaaaagtgggaccgagtcggtcctctgccatcaaagcgtgctcagtctgttttagggtcatgaaggtttttcttttcctgagaaaacaacacgtattgttttctcaggttttgctttttggcctttttctagcttaaaaaaaaaaaaagcaaaagatgctggtggttggcactcctggtttccaggacggggttcaaatccctgcggcgtctttgctttgact

SEQ ID NO: 224 - DNA, 942 bp, synthetic construct
  misc_feature 1..942: note = Synthetic
  source 1..942: mol_type = other DNA
tagttattaatagtaatcaattacggggtcattagttcatagcccatatatggagttccgcgttacataacttacggtaaatggcccgcctggctgaccgcccaacgacccccgcccattgacgtcaataatgacgtatgttcccatagtaacgccaatagggactttccattgacgtcaatgggtggagtatttacggtaaactgcccacttggcagtacatcaagtgtatcatatgccaagtacgccccctattgacgtcaatgacggtaaatggcccgcctggcattatgcccagtacatgaccttatgggactttcctacttggcagtacatctacgtattagtcatcgctattaccatggtgatgcggttttggcagtacatcaatgggcgtggatagcggtttgactcacggggatttccaagtctccaccccattgacgtcaatgggagtttgttttggcaccaaaatcaacgggactttccaaaatgtcgtaacaactccgccccattgacgcaaatgggcggtaggcgtgtacggtgggaggtctatataagcagagctggtttagtgaaccgtcagatcgttcactgccgtataggcagggcccagactgagcacgtgagttttagagctagaaatagcaagttaaaataaggctagtccgttatcaacttgaaaaagtgggaccgagtcggtcctctgccatcaaagcgtgctcagtctgttttgttttggctgggtttttccttgttcgcaccggacacctccagtgaccagacggcaaggtttttatcccagtgtatattggaaaaacatgttatacttttgacaatttaacgtgcctagagctcaaattaaactaataccataacgtaatgcaacttacaacataaataaaggtcaatgtttaatccataaaaaaaaaaaaaaaaaaa

SEQ ID NO: 225 - DNA, 1370 bp, synthetic construct
  misc_feature 1..1370: note = Synthetic
  source 1..1370: mol_type = other DNA
tagttattaatagtaatcaattacggggtcattagttcatagcccatatatggagttccgcgttacataacttacggtaaatggcccgcctggctgaccgcccaacgacccccgcccattgacgtcaataatgacgtatgttcccatagtaacgccaatagggactttccattgacgtcaatgggtggagtatttacggtaaactgcccacttggcagtacatcaagtgtatcatatgccaagtacgccccctattgacgtcaatgacggtaaatggcccgcctggcattatgcccagtacatgaccttatgggactttcctacttggcagtacatctacgtattagtcatcgctattaccatggtgatgcggttttggcagtacatcaatgggcgtggatagcggtttgactcacggggatttccaagtctccaccccattgacgtcaatgggagtttgttttggcaccaaaatcaacgggactttccaaaatgtcgtaacaactccgccccattgacgcaaatgggcggtaggcgtgtacggtgggaggtctatataagcagagctggtttagtgaaccgtcagatcgttcactgccgtataggcagggcccagactgagcacgtgagttttagagctagaaatagcaagttaaaataaggctagtccgttatcaacttgaaaaagtgggaccgagtcggtcctctgccatcaaagcgtgctcagtctgttttgttttggctgggtttttccttgttcgcaccggacacctccagtgaccagacggcaaggtttttatcccagtgtatattggaaaaacatgttatacttttgacaatttaacgtgcctagagctcaaattaaactaataccataacgtaatgcaacttacaacataaataaaggtcaatgtttaatccataaaaaaaaaaaaaaaaaaaacacactgttttggctgggtttttccttgttcgcaccggacacctccagtgaccagacggcaaggtttttatcccagtgtatattggaaaaacatgttatacttttgacaatttaacgtgcctagagctcaaattaaactaataccataacgtaatgcaacttacaacataaataaaggtcaatgtttaatccataaaaaaaaaaaaaaaaaaatctctctgttttggctgggtttttccttgttcgcaccggacacctccagtgaccagacggcaaggtttttatcccagtgtatattggaaaaacatgttatacttttgacaatttaacgtgcctagagctcaaattaaactaataccataacgtaatgcaacttacaacataaataaaggtcaatgtttaatccataaaaaaaaaaaaaaaaaaa

SEQ ID NO: 226 - DNA, 807 bp, synthetic construct
  misc_feature 1..807: note = Synthetic
  source 1..807: mol_type = other DNA
tagttattaatagtaatcaattacggggtcattagttcatagcccatatatggagttccgcgttacataacttacggtaaatggcccgcctggctgaccgcccaacgacccccgcccattgacgtcaataatgacgtatgttcccatagtaacgccaatagggactttccattgacgtcaatgggtggagtatttacggtaaactgcccacttggcagtacatcaagtgtatcatatgccaagtacgccccctattgacgtcaatgacggtaaatggcccgcctggcattatgcccagtacatgaccttatgggactttcctacttggcagtacatctacgtattagtcatcgctattaccatggtgatgcggttttggcagtacatcaatgggcgtggatagcggtttgactcacggggatttccaagtctccaccccattgacgtcaatgggagtttgttttggcaccaaaatcaacgggactttccaaaatgtcgtaacaactccgccccattgacgcaaatgggcggtaggcgtgtacggtgggaggtctatataagcagagctggtttagtgaaccgtcagatcgttcactgccgtataggcagggcccagactgagcacgtgagttttagagctagaaatagcaagttaaaataaggctagtccgttatcaacttgaaaaagtgggaccgagtcggtcctctgccatcaaagcgtgctcagtctgtttgtttcaaaagtagactgtacgctaagggtcatatctttttttgtttggtttgtgtcttggttggcgtcttaaa

SEQ ID NO: 227 - DNA, 743 bp, synthetic construct
  misc_feature 1..743: note = Synthetic
  source 1..743: mol_type = other DNA
ctaaggaccagcttctttgggagagaacagacgcaggggcgggagggaaaaagggagaggcagacgtcacttccccttggcggctctggcagcagattggtcggttgagtggcagaaaggcagacggggactgggcaaggcactgtcggtgacatcacggacagggcgacttctatgtagatgaggcagcgcagaggctgctgcttcgccacttgctgcttcaccacgaaggagttcccgtgccctgggagcgggttcaggaccgctgatcggaagtgagaatcccagctgtgtgtcagggctggaaagggctcgggagtgcgcggggcaagtgaccgtgtgtgtaaagagtgaggcgtatgaggctgtgtcggggcagaggcccaagatctcagttcactgccgtataggcagggcccagactgagcacgtgagttttagagctagaaatagcaagttaaaataaggctagtccgttatcaacttgaaaaagtgggaccgagtcggtcctctgccatcaaagcgtgctcagtctgtttcagcaagttcagagaaatctgaacttgctggatttttggagcagggagatggaataggagcttgctccgtccactccacgcatcgacctggtattgcagtacctccaggaacggtgcacccactttctggagtttcaaaagtagactgtacgctaagggtcatatctttttttgtttggtttgtgtcttggttggcgtcttaaa

SEQ ID NO: 228 - DNA, 141 bp, synthetic construct
  misc_feature 1..141: note = Synthetic
  source 1..141: mol_type = other DNA
ggcccagactgagcacgtgagttttagagctagctcatgaaaatgagctagcaagttaaaataaggctagtccgttatcaacttgaaaaagtgggaccgagtcggtcctctgccatcaaagcgtgctcagtctgttttttt

SEQ ID NO: 229 - DNA, 129 bp, synthetic construct
  misc_feature 1..129: note = Synthetic
  source 1..129: mol_type = other DNA
ggcccagactgagcacgtgagtttgagagctagaaatagcaagtttaaataaggctagtccgttatcaacttgaaaaagtgggaccgagtcggtcctctgccatcaaagcgtgctcagtctgttttttt

SEQ ID NO: 230 - DNA, 197 bp, synthetic construct
  misc_feature 1..197: note = Synthetic
  source 1..197: mol_type = other DNA
ggcccagactgagcacgtgagttttagagctagaaatagcaagttaaaataaggctagtccgttatcaacttgaaaaagtgggaccgagtcggtcctctgccatcaaagcgtgctcagtctgggccggcatggtcccagcctcctcgctggcgccggctgggcaacatgcttcggcatggcgaatgggacttttttt

SEQ ID NO: 231 - DNA, 171 bp, synthetic construct
  misc_feature 1..171: note = Synthetic
  source 1..171: mol_type = other DNA
ggtgggagacgtcccaccggcccagactgagcacgtgagttttagagctagaaatagcaagttaaaataaggctagtccgttatcaacttgaaaaagtgggaccgagtcggtcctctgccatcaaagcttcgaccgtgctcagtctggtgggagacgtcccaccttttttt

SEQ ID NO: 232 - DNA, 180 bp, synthetic construct
  misc_feature 1..180: note = Synthetic
  source 1..180: mol_type = other DNA
gagcagcatggcgtcgctgctcacggcccagactgagcacgtgagttttagagctagaaatagcaagttaaaataaggctagtccgttatcaacttgaaaaagtgggaccgagtcggtcctctgccatcaaagcttcgaccgtgctcagtctccatcagttgacaccctgaggttttttt

SEQ ID NO: 233 - DNA, 188 bp, synthetic construct
  misc_feature 15: note = RNA
  misc_feature 61: note = RNA
  misc_feature 101: note = RNA
  source 1..188: mol_type = other DNA
  misc_feature 1..14: note = DNA
  misc_feature 16..60: note = DNA
  misc_feature 62..100: note = DNA
  misc_feature 102..188: note = DNA
gcagacctaagtggtgacatatggtctgggcccagactgagcacgtgagttttagagctatacgtagcaagttaaaataaggctagtccgttatcaactttacgaagtgggaccgagtcggtcctctgccatcaaagcttcgaccgtgctcagtctgcatgcgattagaaataatcgcatgttttttt

SEQ ID NO: 234 - DNA, 125 bp, synthetic construct
  misc_feature 1..125: note = Synthetic
  source 1..125: mol_type = other DNA
tctgccatcaaagctgcgaccgtgctcagtctggtgggagacgtcccaccggccggcatggtcccagcctcctcgctggcgccggctgggcaacatgcttcggcatggcgaatgggacttttttt

SEQ ID NO: 235 - protein, 328 aa, unidentified
  REGION 1..328: note = Bordetella phage
MGKRHRNLIDQITTWENLLDAYRKTSHGKRRTWGYLEFKEYDLANLLALQAELKAGNYERGPYREFLVYEPKPRLISALEFKDRLVQHALCNIVAPIFEAGLLPYTYACRPDKGTHAGVCHVQAELRRTRATHFLKSDFSKFFPSIDRAALYAMIDKKIHCAATRRLLRVVLPDEGVGIPIGSLTSQLFANVYGGAVDRLLHDELKQRHWARYMDDIVVLGDDPEELRAVFYRLRDFASERLGLKISHWQVAPVSRGINFLGYRIWPTHKLLRKSSVKRAKRKVANFIKHGEDESLQRFLASWSGHAQWADTHNLFTWMEEQYGIACH

SEQ ID NO: 236 - protein, 128 aa, unidentified
  REGION 1..128: note = Bordetella phage
MEPIEEATKCYDQMLIVERYERVISYLYPIAQSIPRKHGVAREMFLKCLLGQVELFIVAGKSNQVSKLYAADAGLAMLRFWLRFLAGIQKPHAMTPHQVETAQVLIAEVGRILGSWIARVNRKGQAGK

SEQ ID NO: 237 - RNA, 169 nt, unidentified
  misc_feature 1..169: note = Bordetella phage
  source 1..169: mol_type = genomic RNA
accttcttgcatggctctgccaacgctacggcttggcgggctggcctttcctcaataggtggtcagccggttctgtcctgcttcggcgaacacgttacacggttcggcaaaacgtcgattactgaaaatggaaaggcggggccgacttcaagggcaggctgggaaataa

SEQ ID NO: 238 - RNA, 149 nt, synthetic construct
  misc_feature 1..149: note = Synthetic
  source 1..149: mol_type = other RNA
accttcttgcatggctctgccaacgctacggcttggcgggctggcctttcctcaataggtggtcagccggttctgtcctgcttcggcgaacacgttacacggttcggcaaaacgtcgattactgaaaatggaaaggcggggccgacttc

SEQ ID NO: 239 - RNA, 85 nt, synthetic construct
  misc_feature 1..85: note = Synthetic
  source 1..85: mol_type = other RNA
accttcttgcatggctctgccaacgctacggcttggcgggctggcctttcctcaataggtggtcaaagggcaggctgggaaataa

SEQ ID NO: 240 - RNA, 160 nt, synthetic construct
  misc_feature 1..160: note = Synthetic
  source 1..160: mol_type = other RNA
catggctctgccaacgctacggcttggcgggctggcctttcctcaataggtggtcagccggttctgtcctgcttcggcgaacacgttacacggttcggcaaaacgtcgattactgaaaatggaaaggcggggccgacttcaagggcaggctgggaaataa

SEQ ID NO: 241 - RNA, 140 nt, synthetic construct
  misc_feature 1..140: note = Synthetic
  source 1..140: mol_type = other RNA
catggctctgccaacgctacggcttggcgggctggcctttcctcaataggtggtcagccggttctgtcctgcttcggcgaacacgttacacggttcggcaaaacgtcgattactgaaaatggaaaggcggggccgacttc

SEQ ID NO: 242 - RNA, 76 nt, synthetic construct
  misc_feature 1..76: note = Synthetic
  source 1..76: mol_type = other RNA
catggctctgccaacgctacggcttggcgggctggcctttcctcaataggtggtcaaagggcaggctgggaaataa

SEQ ID NO: 243 - RNA, 56 nt, synthetic construct
  misc_feature 1..56: note = Synthetic
  source 1..56: mol_type = other RNA
catggctctgccaacgctacggcttggcgggctggcctttcctcaataggtggtca

SEQ ID NO: 244 - RNA, 169 nt, synthetic construct
  misc_feature 1..169: note = Synthetic
  source 1..169: mol_type = other RNA
accttcttgcatggctctgccaacgctacggcttggcgggctggcctttcctcaatagatgagccgccggttctgtcctgcttcggcgaacacgttacacggttcggcaaaacgtcgattactgaaaatggaaaggcggggccgacttcaagggcaggctgggaaataa

SEQ ID NO: 245 - protein, 15 aa, synthetic construct
  REGION 1..15: note = Synthetic
GLNDIFEAQKIEWHE

SEQ ID NO: 246 - protein, 4 aa, synthetic construct
  REGION 1..4: note = Synthetic
EPEA

SEQ ID NO: 247 - protein, 26 aa, synthetic construct
  REGION 1..26: note = Synthetic
KRRWKKNFIAVSAANRFKKISSSGAL

SEQ ID NO: 248 - protein, 6 aa, synthetic construct
  REGION 1..6: note = Synthetic
EEEEEE

SEQ ID NO: 249 - protein, 13 aa, synthetic construct
  REGION 1..13: note = Synthetic
GAPVPYPDPLEPR

SEQ ID NO: 250 - protein, 8 aa, synthetic construct
  REGION 1..8: note = Synthetic
DYKDDDDK

SEQ ID NO: 251 - protein, 9 aa, synthetic construct
  REGION 1..9: note = Synthetic
YPYDVPDYA

SEQ ID NO: 252-254 - skipped (3 entries)

SEQ ID NO: 255 - protein, 4 aa, synthetic construct
  REGION 1..4: note = Synthetic
HHHH

SEQ ID NO: 256 - protein, 5 aa, synthetic construct
  REGION 1..5: note = Synthetic
HHHHH

SEQ ID NO: 257 - protein, 6 aa, synthetic construct
  REGION 1..6: note = Synthetic
HHHHHH

SEQ ID NO: 258 - protein, 7 aa, synthetic construct
  REGION 1..7: note = Synthetic
HHHHHHH

SEQ ID NO: 259 - protein, 8 aa, synthetic construct
  REGION 1..8: note = Synthetic
HHHHHHHH

SEQ ID NO: 260 - protein, 9 aa, synthetic construct
  REGION 1..9: note = Synthetic
HHHHHHHHH

SEQ ID NO: 261 - protein, 10 aa, synthetic construct
  REGION 1..10: note = Synthetic
HHHHHHHHHH

SEQ ID NO: 262 - protein, 25 aa, synthetic construct
  REGION 1..25: note = Synthetic
  REGION 2..25: note = May be absent
HHHHHHHHHHHHHHHHHHHHHHHHH

SEQ ID NO: 263 - protein, 10 aa, synthetic construct
  REGION 1..10: note = Synthetic
EQKLISEEDL

SEQ ID NO: 264 - protein, 18 aa, synthetic construct
  REGION 1..18: note = Synthetic
TKENPRSNQEESYDDNES

SEQ ID NO: 265 - protein, 9 aa, synthetic construct
  REGION 1..9: note = Synthetic
TETSQVAPA

SEQ ID NO: 266 - protein, 15 aa, synthetic construct
  REGION 1..15: note = Synthetic
KETAAAKFERQHMDS

SEQ ID NO: 267 - protein, 38 aa, synthetic construct
  REGION 1..38: note = Synthetic
MDEKTTGWRGGHVVEGLAGELEQLRARLEHHPQGQREP

SEQ ID NO: 268 - protein, 13 aa, synthetic construct
  REGION 1..13: note = Synthetic
SLAELLNAGLGGS

SEQ ID NO: 269 - protein, 8 aa, synthetic construct
  REGION 1..8: note = Synthetic
TQDPSRVG

SEQ ID NO: 270 - protein, 12 aa, synthetic construct
  REGION 1..12: note = Synthetic
PDRVRAVSHWSS

SEQ ID NO: 271 - protein, 8 aa, synthetic construct
  REGION 1..8: note = Synthetic
WSHPQFEK

SEQ ID NO: 272 - protein, 6 aa, synthetic construct
  REGION 1..6: note = Synthetic
CCPGCC

SEQ ID NO: 273 - protein, 10 aa, synthetic construct
  REGION 1..10: note = Synthetic
EVHTNQDPLD

SEQ ID NO: 274 - protein, 14 aa, synthetic construct
  REGION 1..14: note = Synthetic
GKPIPNPLLGLDST

SEQ ID NO: 275 - protein, 11 aa, synthetic construct
  REGION 1..11: note = Synthetic
YTDIEMNRLGK

SEQ ID NO: 276 - protein, 8 aa, synthetic construct
  REGION 1..8: note = Synthetic
DLYDDDDK

SEQ ID NO: 277 - RNA, 65 nt, synthetic construct
  misc_feature 1..65: note = Synthetic
  source 1..65: mol_type = other RNA
accttcttgcatggctctgccaacgctacggcttggcgggctggcctttcctcaataggtggtca

SEQ ID NO: 278 - protein, 6 aa, synthetic construct
  REGION 1..6: note = Synthetic
DTYRYI

SEQ ID NO: 279 - protein, 6 aa, synthetic construct
  REGION 1..6: note = Synthetic
TDFYLK

SEQ ID NO: 280 - protein, 11 aa, synthetic construct
  REGION 1..11: note = Synthetic
MASMTGGQQMG

SEQ ID NO: 281 - protein, 6 aa, synthetic construct
  REGION 1..6: note = Synthetic
QYPALT

SEQ ID NO: 282 - protein, 10 aa, synthetic construct
  REGION 1..10: note = Synthetic
SSTSSDFRDR

SEQ ID NO: 283 - protein, 19 aa, synthetic construct
  REGION 1..19: note = Synthetic
KDHLIHNVHKEFHAHAHNK

SEQ ID NO: 284 - protein, 8 aa, synthetic construct
  REGION 1..8: note = Synthetic
QPELAPED

SEQ ID NO: 285 - protein, 5 aa, synthetic construct
  REGION 1..5: note = Synthetic
RRRRR

SEQ ID NO: 286 - protein, 4 aa, synthetic construct
  REGION 1..4: note = Synthetic
CCCC

SEQ ID NO: 287 - protein, 11 aa, synthetic construct
  REGION 1..11: note = Synthetic
FFFFFFFFFFF

SEQ ID NO: 288 - protein, 9 aa, synthetic construct
  REGION 1..9: note = Synthetic
NANNPDWDF

SEQ ID NO: 289 - protein, 15 aa, synthetic construct
  REGION 1..15: note = Synthetic
KETAAAKFERQHMDS

SEQ ID NO: 290 - protein, 11 aa, synthetic construct
  REGION 1..11: note = Synthetic
YTDIEMNRLGK

SEQ ID NO: 291 - protein, 253 aa, Homo sapiens
MANLGCWMLVLFVATWSDLGLCKKRPKPGGWNTGGSRYPGQGSPGGNRYPPQGGGGWGQPHGGGWGQPHGGGWGQPHGGGWGQPHGGGWGQGGGTHSQWNKPSKPKTNMKHMAGAAAAGAVVGGLGGYMLGSAMSRPIIHFGSDYEDRYYRENMHRYPNQVYYRPMDEYSNQNNFVHDCVNITIKQHTVTTTTKGENFTETDVKMMERVVEQMCITQYERESQAYYQRGSSMVLFSSPPVILLISFLIFLIVG

SEQ ID NO: 292 - DNA, 2365 bp, Homo sapiens
  source 1..2365: mol_type = genomic DNA
gcgaaccttggctgctggatgctggttctctttgtggccacatggagtgacctgggcctctgcaagaagcgcccgaagcctggaggatggaacactgggggcagccgatacccggggcagggcagccctggaggcaaccgctacccacctcagggcggtggtggctgggggcagcctcatggtggtggctgggggcagcctcatggtggtggctgggggcagccccatggtggtggctggggacagcctcatggtggtggctggggtcaaggaggtggcacccacagtcagtggaacaagccgagtaagccaaaaaccaacatgaagcacatggctggtgctgcagcagctggggcagtggtggggggccttggcggctacatgctgggaagtgccatgagcaggcccatcatacatttcggcagtgactatgaggaccgttactatcgtgaaaacatgcaccgttaccccaaccaagtgtactacaggcccatggatgagtacagcaaccagaacaactttgtgcacgactgcgtcaatatcacaatcaagcagcacacggtcaccacaaccaccaagggggagaacttcaccgagaccgacgttaagatgatggagcgcgtggttgagcagatgtgtatcacccagtacgagagggaatctcaggcctattaccagagaggatcgagcatggtcctcttctcctctccacctgtgatcctcctgatctctttcctcatcttcctgatagtgggatgaggaaggtcttcctgttttcaccatctttctaatctttttccagcttgagggaggcggtatccacctgcagcccttttagtggtggtgtctcactctttcttctctctttgtcccggataggctaatcaatacccttggcactgatgggcactggaaaacatagagtagacctgagatgctggtcaagccccctttgattgagttcatcatgagccgttgctaatgccaggccagtaaaagtataacagcaaataaccattggttaatctggacttatttttggacttagtgcaacaggttgaggctaaaacaaatctcagaacagtctgaaatacctttgcctggatacctctggctccttcagcagctagagctcagtatactaatgccctatcttagtagagatttcatagctatttagagatattttccattttaagaaaacccgacaacatttctgccaggtttgttaggaggccacatgatacttattcaaaaaaatcctagagattcttagctcttgggatgcaggctcagcccgctggagcatgagctctgtgtgtaccgagaactggggtgatgttttacttttcacagtatgggctacacagcagctgttcaacaagagtaaatattgtcacaacactgaacctctggctagaggacatattcacagtgaacataactgtaacatatatgaaaggcttctgggacttgaaatcaaatgtttgggaatggtgcccttggaggcaacctcccattttagatgtttaaaggaccctatatgtggcattcctttctttaaactataggtaattaaggcagctgaaaagtaaattgccttctagacactgaaggcaaatctcctttgtccatttacctggaaaccagaatgattttgacatacaggagagctgcagttgtgaaagcaccatcatcatagaggatgatgtaattaaaaaatggtcagtgtgcaaagaaaagaactgcttgcatttctttatttctgtctcataattgtcaaaaaccagaattaggtcaagttcatagtttctgtaattggcttttgaatcaaagaatagggagacaatctaaaaaatatcttaggttggagatgacagaaatatgattgatttgaagtggaaaaagaaattctgttaatgttaattaaagtaaaattattccctgaattgtttgatattgtcacctagcagatatgtattacttttctgcaatgttattattggcttgcactttgtgagtattctatgtaaaaatatatatgtatataaaatatatattgcataggacagacttaggagttttgtttagagcagttaacatctgaagtgtctaatgcattaacttttgtaaggtactgaatacttaatatgtgggaaacccttttgcgtggtccttaggcttacaatgtgcactgaatcgtttcatgtaagaatccaaagtggacaccattaacaggtctttgaaatatgcatgtactttatattttctatatttgtaactttgcatgttcttgttttgttatataaaaaaattgtaaatgtttaatatctgactgaaattaaacgagcgaagatgagcacca

SEQ ID NO: 293-295 - skipped (3 entries)

SEQ ID NO: 296 - protein, 240 aa, synthetic construct
  REGION 1..240: note = Synthetic
MANLGCWMLVLFVATWSDLGLCKKRPKPGGWNTGGSRYPGQGSPGGNRYPPQGGGGWGQPHGGGWGQPHGGGWGQPHGGGWGQPHGGGWGQGGGTHSQWNKPSKPKTNMKHMAGAAAAGAVVGGLGGYMLGSAMSRPIIHFGSDYEDRYYRENMHRYPNQVYYRPMDEYSNQNNFVHDCVNITIKQHTVTTTTKGANFTETDVKMMERVVEQMCITQYERESQAYYQRGSSMVLFSSPPV

SEQ ID NO: 297 - skipped

SEQ ID NO: 298 - protein, 240 aa, synthetic construct
  REGION 1..240: note = Synthetic
MANLGCWMLVLFVATWSDLGLCKKRPKPGGWNTGGSRYPGQGSPGGNRYPPQGGGGWGQPHGGGWGQPHGGGWGQPHGGGWGQPHGGGWGQGGGTHSQWNKPSKPKTNMKHMAGAAAAGAVVGGLGGYMLGSAMSRPIIHFGSDYEDRYYRENMHRYPNQVYYRPMDEYSNQNNFVHDCVNITIKQHTVTTTTKGENFTGTDVKMMERVVEQMCITQYERESQAYYQRGSSMVLFSSPPV

SEQ ID NO: 299-330 - skipped (32 entries)

SEQ ID NO: 331 - DNA, 122 bp, synthetic construct
  misc_feature 1..122: note = Synthetic
  source 1..122: mol_type = other DNA
aacttgtttattgcagcttataatggttacaaataaagcaatagcatcacaaatttcacaaataaagcatttttttcactgcattctagttgtggtttgtccaaactcatcaatgtatctta

SEQ ID NO: 332 - DNA, 252 bp, synthetic construct
  misc_feature 1..252: note = Synthetic
  source 1..252: mol_type = other DNA
atccttccagtcagggccatgtttgagagctagaaatagcaagtttaaataaggctagtccgttatcaacttgaaaaagtgggaccgagtcggtccacctgaaccgtatatctaagatacattgatgagtttggacaaaccacaactagaatgcagtgaaaaaaatgctttatttgtgaaatttgtgatgctattgctttatttgtaaccattataagctgcaataaacaagttctatggccctgactggaa

SEQ ID NO: 333 - DNA, 146 bp, synthetic construct
  misc_feature 1..146: note = Synthetic
  source 1..146: mol_type = other DNA
ccatggcccaacttgtttattgcagcttataatggttacaaataaagcaatagcatcacaaatttcacaaataaagcatttttttcactgcattctagttgtggtttgtccaaactcatcaatgtatcttatcatgtctggatctc

SEQ ID NO: 334 - DNA, 276 bp, synthetic construct
  misc_feature 1..276: note = Synthetic
  source 1..276: mol_type = other DNA
atccttccagtcagggccatgtttgagagctagaaatagcaagtttaaataaggctagtccgttatcaacttgaaaaagtgggaccgagtcggtccacctgaaccgtatatcgagatccagacatgataagatacattgatgagtttggacaaaccacaactagaatgcagtgaaaaaaatgctttatttgtgaaatttgtgatgctattgctttatttgtaaccattataagctgcaataaacaagttgggccatggctatggccctgactggaa

SEQ ID NO: 335 - DNA, 244 bp, synthetic construct
  misc_feature 1..244: note = Synthetic
  source 1..244: mol_type = other DNA
tgatcataatcaagccatatcacatctgtagaggtttacttgctttaaaaaacctccacacctccccctgaacctgaaacataaaatgaatgcaattgttgttgttaacttgtttattgcagcttataatggttacaaataaagcaatagcatcacaaatttcacaaataaagcatttttttcactgcattctagttgtggtttgtccaaactcatcaatgtatcttatcatgtctggatctgc

SEQ ID NO: 336 - DNA, 374 bp, synthetic construct
  misc_feature 1..374: note = Synthetic
  source 1..374: mol_type = other DNA
atccttccagtcagggccatgtttgagagctagaaatagcaagtttaaataaggctagtccgttatcaacttgaaaaagtgggaccgagtcggtccacctgaaccgtatatcgcagatccagacatgataagatacattgatgagtttggacaaaccacaactagaatgcagtgaaaaaaatgctttatttgtgaaatttgtgatgctattgctttatttgtaaccattataagctgcaataaacaagttaacaacaacaattgcattcattttatgtttcaggttcagggggaggtgtggaggttttttaaagcaagtaaacctctacagatgtgatatggcttgattatgatcactatggccctgactggaa

SEQ ID NO: 337 - DNA, 479 bp, synthetic construct
  misc_feature 1..479: note = Synthetic
  source 1..479: mol_type = other DNA
acgggtggcatccctgtgacccctccccagtgcctctcctggccctggaagttgccactccagtgcccaccagccttgtcctaataaaattaagttgcatcattttgtctgactaggtgtccttctataatattatggggtggaggggggtggtatggagcaaggggcaagttgggaagacaacctgtagggcctgcggggtctattgggaaccaagctggagtgcagtggcacaatcttggctcactgcaatctccgcctcctgggttcaagcgattctcctgcctcagcctcccgagttgttgggattccaggcatgcatgaccaggctcagctaatttttgtttttttggtagagacggggtttcaccatattggccaggctggtctccaactcctaatctcaggtgatctacccaccttggcctcccaaattgctgggattacaggcgtgaaccactgctcccttccctgtcctt

SEQ ID NO: 338 - DNA, 609 bp, synthetic construct
  misc_feature 1..609: note = Synthetic
  source 1..609: mol_type = other DNA
atccttccagtcagggccatgtttgagagctagaaatagcaagtttaaataaggctagtccgttatcaacttgaaaaagtgggaccgagtcggtccacctgaaccgtatatcaaggacagggaagggagcagtggttcacgcctgtaatcccagcaatttgggaggccaaggtgggtagatcacctgagattaggagttggagaccagcctggccaatatggtgaaaccccgtctctaccaaaaaaacaaaaattagctgagcctggtcatgcatgcctggaatcccaacaactcgggaggctgaggcaggagaatcgcttgaacccaggaggcggagattgcagtgagccaagattgtgccactgcactccagcttggttcccaatagaccccgcaggccctacaggttgtcttcccaacttgccccttgctccataccacccccctccaccccataatattatagaaggacacctagtcagacaaaatgatgcaacttaattttattaggacaaggctggtgggcactggagtggcaacttccagggccaggagaggcactggggaggggtcacagggatgccacccgtctatggccctgactggaa

SEQ ID NO: 339 - DNA, 228 bp, synthetic construct
  misc_feature 1..228: note = Synthetic
  source 1..228: mol_type = other DNA
cgactgtgccttctagttgccagccatctgttgtttgcccctcccccgtgccttccttgaccctggaaggtgccactcccactgtcctttcctaataaaatgaggaaattgcatcgcattgtctgagtaggtgtcattctattctggggggtggggtggggcaggacagcaagggggaggattgggaagacaatagcaggcatgctggggatgcggtgggctctatgg

SEQ ID NO: 340 - DNA, 358 bp, synthetic construct
  misc_feature 1..358: note = Synthetic
  source 1..358: mol_type = other DNA
atccttccagtcagggccatgtttgagagctagaaatagcaagtttaaataaggctagtccgttatcaacttgaaaaagtgggaccgagtcggtccacctgaaccgtatatcccatagagcccaccgcatccccagcatgcctgctattgtcttcccaatcctcccccttgctgtcctgccccaccccaccccccagaatagaatgacacctactcagacaatgcgatgcaatttcctcattttattaggaaaggacagtgggagtggcaccttccagggtcaaggaaggcacgggggaggggcaaacaacagatggctggcaactagaaggcacagtcgctatggccctgactggaa

SEQ ID NO: 341 - DNA, 527 bp, synthetic construct
  misc_feature 1..527: note = Synthetic
  source 1..527: mol_type = other DNA
ttcactcctcaggtgcaggctgcctatcagaaggtggtggctggtgtggccaatgccctggctcacaaataccactgagatctttttccctctgccaaaaattatggggacatcatgaagccccttgagcatctgacttctggctaataaaggaaatttattttcattgcaatagtgtgttggaattttttgtgtctctcactcggaaggacatatgggagggcaaatcatttaaaacatcagaatgagtatttggtttagagtttggcaacatatgcccatatgctggctgccatgaacaaaggttggctataaagaggtcatcagtatatgaaacagccccctgctgtccattccttattccatagaaaagccttgacttgaggttagattttttttatattttgttttgtgttatttttttctttaacatccctaaaattttccttacatgttttactagccagatttttcctcctctcctgactactcccagtcatagctgtccctcttctcttatggagatc

SEQ ID NO: 342 - DNA, 657 bp, synthetic construct
  misc_feature 1..657: note = Synthetic
  source 1..657: mol_type = other DNA
atccttccagtcagggccatgtttgagagctagaaatagcaagtttaaataaggctagtccgttatcaacttgaaaaagtgggaccgagtcggtccacctgaaccgtatatcgatctccataagagaagagggacagctatgactgggagtagtcaggagaggaggaaaaatctggctagtaaaacatgtaaggaaaattttagggatgttaaagaaaaaaataacacaaaacaaaatataaaaaaaatctaacctcaagtcaaggcttttctatggaataaggaatggacagcagggggctgtttcatatactgatgacctctttatagccaacctttgttcatggcagccagcatatgggcatatgttgccaaactctaaaccaaatactcattctgatgttttaaatgatttgccctcccatatgtccttccgagtgagagacacaaaaaattccaacacactattgcaatgaaaataaatttcctttattagccagaagtcagatgctcaaggggcttcatgatgtccccataatttttggcagagggaaaaagatctcagtggtatttgtgagccagggcattggccacaccagccaccaccttctgataggcagcctgcacctgaggagtgaactatggccctgactggaa

SEQ ID NO: 343 - DNA, 271 bp, synthetic construct
  misc_feature 1..271: note = Synthetic
  source 1..271: mol_type = other DNA
gggggaggctaactgaaacacggaaggagacaataccggaaggaacccgcgctatgacggcaataaaaagacagaataaaacgcacgggtgttgggtcgtttgttcataaacgcggggttcggtcccagggctggcactctgtcgataccccaccgagaccccattggggccaatacgcccgcgtttcttccttttccccaccccaccccccaagttcgggtgaaggcccagggctcgcagccaacgtcggggcggcaggccctgccatag

SEQ ID NO: 344 - DNA, 401 bp, synthetic construct
  misc_feature 1..401: note = Synthetic
  source 1..401: mol_type = other DNA
atccttccagtcagggccatgtttgagagctagaaatagcaagtttaaataaggctagtccgttatcaacttgaaaaagtgggaccgagtcggtccacctgaaccgtatatcctatggcagggcctgccgccccgacgttggctgcgagccctgggccttcacccgaacttggggggtggggtggggaaaaggaagaaacgcgggcgtattggccccaatggggtctcggtggggtatcgacagagtgccagccctgggaccgaaccccgcgtttatgaacaaacgacccaacacccgtgcgttttattctgtctttttattgccgtcatagcgcgggttccttccggtattgtctccttccgtgtttcagttagcctcccccctatggccctgactggaa

SEQ ID NO: 345 - DNA, 171 bp, synthetic construct
  misc_feature 1..171: note = Synthetic
  source 1..171: mol_type = other DNA
tagggtcatgaaggtttttcttttcctgagaaaacaacacgtattgttttctcaggttttgctttttggcctttttctagcttaaaaaaaaaaaaagcaaaagatgctggtggttggcactcctggtttccaggacggggttcaaatccctgcggcgtctttgctttgact

SEQ ID NO: 346 - DNA, 301 bp, synthetic construct
  misc_feature 1..301: note = Synthetic
  source 1..301: mol_type = other DNA
atccttccagtcagggccatgtttgagagctagaaatagcaagtttaaataaggctagtccgttatcaacttgaaaaagtgggaccgagtcggtccacctgaaccgtatatcagtcaaagcaaagacgccgcagggatttgaaccccgtcctggaaaccaggagtgccaaccaccagcatcttttgctttttttttttttaagctagaaaaaggccaaaaagcaaaacctgagaaaacaatacgtgttgttttctcaggaaaagaaaaaccttcatgaccctactatggccctgactggaa

SEQ ID NO: 347 - DNA, 208 bp, synthetic construct
  misc_feature 1..208: note = Synthetic
  source 1..208: mol_type = other DNA
tgttttggctgggtttttccttgttcgcaccggacacctccagtgaccagacggcaaggtttttatcccagtgtatattggaaaaacatgttatacttttgacaatttaacgtgcctagagctcaaattaaactaataccataacgtaatgcaacttacaacataaataaaggtcaatgtttaatccataaaaaaaaaaaaaaaaaaa

SEQ ID NO: 348 - DNA, 338 bp, synthetic construct
  misc_feature 1..338: note = Synthetic
  source 1..338: mol_type = other DNA
atccttccagtcagggccatgtttgagagctagaaatagcaagtttaaataaggctagtccgttatcaacttgaaaaagtgggaccgagtcggtccacctgaaccgtatatctttttttttttttttttttatggattaaacattgacctttatttatgttgtaagttgcattacgttatggtattagtttaatttgagctctaggcacgttaaattgtcaaaagtataacatgtttttccaatatacactgggataaaaaccttgccgtctggtcactggaggtgtccggtgcgaacaaggaaaaacccagccaaaacactatggccctgactggaa

SEQ ID NO: 349 - DNA, 636 bp, synthetic construct
  misc_feature 1..636: note = Synthetic
  source 1..636: mol_type = other DNA
tgttttggctgggtttttccttgttcgcaccggacacctccagtgaccagacggcaaggtttttatcccagtgtatattggaaaaacatgttatacttttgacaatttaacgtgcctagagctcaaattaaactaataccataacgtaatgcaacttacaacataaataaaggtcaatgtttaatccataaaaaaaaaaaaaaaaaaaacacactgttttggctgggtttttccttgttcgcaccggacacctccagtgaccagacggcaaggtttttatcccagtgtatattggaaaaacatgttatacttttgacaatttaacgtgcctagagctcaaattaaactaataccataacgtaatgcaacttacaacataaataaaggtcaatgtttaatccataaaaaaaaaaaaaaaaaaatctctctgttttggctgggtttttccttgttcgcaccggacacctccagtgaccagacggcaaggtttttatcccagtgtatattggaaaaacatgttatacttttgacaatttaacgtgcctagagctcaaattaaactaataccataacgtaatgcaacttacaacataaataaaggtcaatgtttaatccataaaaaaaaaaaaaaaaaaa

SEQ ID NO: 350 - DNA, 766 bp, synthetic construct
  misc_feature 1..766: note = Synthetic
  source 1..766: mol_type = other DNA
atccttccagtcagggccatgtttgagagctagaaatagcaagtttaaataaggctagtccgttatcaacttgaaaaagtgggaccgagtcggtccacctgaaccgtatatctttttttttttttttttttatggattaaacattgacctttatttatgttgtaagttgcattacgttatggtattagtttaatttgagctctaggcacgttaaattgtcaaaagtataacatgtttttccaatatacactgggataaaaaccttgccgtctggtcactggaggtgtccggtgcgaacaaggaaaaacccagccaaaacagagagatttttttttttttttttttatggattaaacattgacctttatttatgttgtaagttgcattacgttatggtattagtttaatttgagctctaggcacgttaaattgtcaaaagtataacatgtttttccaatatacactgggataaaaaccttgccgtctggtcactggaggtgtccggtgcgaacaaggaaaaacccagccaaaacagtgtgttttttttttttttttttttatggattaaacattgacctttatttatgttgtaagttgcattacgttatggtattagtttaatttgagctctaggcacgttaaattgtcaaaagtataacatgtttttccaatatacactgggataaaaaccttgccgtctggtcactggaggtgtccggtgcgaacaaggaaaaacccagccaaaacactatggccctgactggaa

SEQ ID NO: 351 - DNA, 204 bp, synthetic construct
  misc_feature 1..204: note = Synthetic
  source 1..204: mol_type = other DNA
cagcaagttcagagaaatctgaacttgctggatttttggagcagggagatggaataggagcttgctccgtccactccacgcatcgacctggtattgcagtacctccaggaacggtgcacccactttctggagtttcaaaagtagactgtacgctaagggtcatatctttttttgtttggtttgtgtcttggttggcgtcttaaa

SEQ ID NO: 352 - DNA, 334 bp, synthetic construct
  misc_feature 1..334: note = Synthetic
  source 1..334: mol_type = other DNA
atccttccagtcagggccatgtttgagagctagaaatagcaagtttaaataaggctagtccgttatcaacttgaaaaagtgggaccgagtcggtccacctgaaccgtatatctttaagacgccaaccaagacacaaaccaaacaaaaaaagatatgacccttagcgtacagtctacttttgaaactccagaaagtgggtgcaccgttcctggaggtactgcaataccaggtcgatgcgtggagtggacggagcaagctcctattccatctccctgctccaaaaatccagcaagttcagatttctctgaacttgctgctatggccctgactggaa

SEQ ID NO: 353 - DNA, 73 bp, synthetic construct
  misc_feature 1..73: note = Synthetic
  source 1..73: mol_type = other DNA
gtttcaaaagtagactgtacgctaagggtcatatctttttttgtttggtttgtgtcttggttggcgtcttaaa

SEQ ID NO: 354 - DNA, 203 bp, synthetic construct
  misc_feature 1..203: note = Synthetic
  source 1..203: mol_type = other DNA
atccttccagtcagggccatgtttgagagctagaaatagcaagtttaaataaggctagtccgttatcaacttgaaaaagtgggaccgagtcggtccacctgaaccgtatatctttaagacgccaaccaagacacaaaccaaacaaaaaaagatatgacccttagcgtacagtctacttttgaaacctatggccctgactggaa

SEQ ID NO: 355 - DNA, 73 bp, synthetic construct
  misc_feature 1..73: note = Synthetic
  source 1..73: mol_type = other DNA
gcccggctagctcagtcggtagagcatgagactcttaatctcagggtcgtgggttcgagccccacgttgggcg

SEQ ID NO: 356 - DNA, 203 bp, synthetic construct
  misc_feature 1..203: note = Synthetic
  source 1..203: mol_type = other DNA
atccttccagtcagggccatgtttgagagctagaaatagcaagtttaaataaggctagtccgttatcaacttgaaaaagtgggaccgagtcggtccacctgaaccgtatatccgcccaacgtggggctcgaacccacgaccctgagattaagagtctcatgctctaccgactgagctagccgggcctatggccctgactggaa

SEQ ID NO: 357 - DNA, 49 bp, synthetic construct
  misc_feature 1..49: note = Synthetic
  source 1..49: mol_type = other DNA
gagacggtcgggtccagatattcgtatctgtcgagtagagtgtgggctc

SEQ ID NO: 358 - DNA, 179 bp, synthetic construct
  misc_feature 1..179: note = Synthetic
  source 1..179: mol_type = other DNA
atccttccagtcagggccatgtttgagagctagaaatagcaagtttaaataaggctagtccgttatcaacttgaaaaagtgggaccgagtcggtccacctgaaccgtatatcgagcccacactctactcgacagatacgaatatctggacccgaccgtctcctatggccctgactggaa

SEQ ID NO: 359 - DNA, 98 bp, synthetic construct
  misc_feature 1..98: note = Synthetic
  source 1..98: mol_type = other DNA
gacgcaactgaatgaaatggtgaaggacgggtccaggtgtggctgcttcggcagtgcagcttgttgagtagagtgtgagctccgtaactagtcgcgtc

SEQ ID NO: 360 - DNA, 228 bp, synthetic construct
  misc_feature 1..228: note = Synthetic
  source 1..228: mol_type = other DNA
atccttccagtcagggccatgtttgagagctagaaatagcaagtttaaataaggctagtccgttatcaacttgaaaaagtgggaccgagtcggtccacctgaaccgtatatcgacgcgactagttacggagctcacactctactcaacaagctgcactgccgaagcagccacacctggacccgtccttcaccatttcattcagttgcgtcctatggccctgactggaa

SEQ ID NO: 361 - DNA, 95 bp, synthetic construct
  misc_feature 1..95: note = Synthetic
  source 1..95: mol_type = other DNA
gatgtaactgaatgaaatggtgaaggacgggtccagtaggctgcttcggcagcctacttgttgagtagagtgtgagctccgtaactagttacatc

SEQ ID NO: 362 - DNA, 225 bp, synthetic construct
  misc_feature 1..225: note = Synthetic
  source 1..225: mol_type = other DNA
atccttccagtcagggccatgtttgagagctagaaatagcaagtttaaataaggctagtccgttatcaacttgaaaaagtgggaccgagtcggtccacctgaaccgtatatcgatgtaactagttacggagctcacactctactcaacaagtaggctgccgaagcagcctactggacccgtccttcaccatttcattcagttacatcctatggccctgactggaa

SEQ ID NO: 363 - DNA, 40 bp, synthetic construct
  misc_feature 1..40: note = Synthetic
  source 1..40: mol_type = other DNA
ggcacgtacgaagggacggtgcggagaggagagtacgtgc

SEQ ID NO: 364 - DNA, 170 bp, synthetic construct
  misc_feature 1..170: note = Synthetic
  source 1..170: mol_type = other DNA
atccttccagtcagggccatgtttgagagctagaaatagcaagtttaaataaggctagtccgttatcaacttgaaaaagtgggaccgagtcggtccacctgaaccgtatatcgcacgtactctcctctccgcaccgtcccttcgtacgtgccctatggccctgactggaa

SEQ ID NO: 365 - DNA, 68 bp, synthetic construct
  misc_feature 1..68: note = Synthetic
  source 1..68: mol_type = other DNA
ggccggcatggtcccagcctcctcgctggcgccggctgggcaacatgcttcggcatggcgaatgggac

SEQ ID NO: 366 - DNA, 198 bp, synthetic construct
  misc_feature 1..198: note = Synthetic
  source 1..198: mol_type = other DNA
atccttccagtcagggccatgtttgagagctagaaatagcaagtttaaataaggctagtccgttatcaacttgaaaaagtgggaccgagtcggtccacctgaaccgtatatcgtcccattcgccatgccgaagcatgttgcccagccggcgccagcgaggaggctgggaccatgccggccctatggccctgactggaa

SEQ ID NO: 367 - DNA, 25 bp, synthetic construct
  misc_feature 1..25: note = Synthetic
  source 1..25: mol_type = other DNA
ggactctaggactggactttggact

SEQ ID NO: 368 - DNA, 155 bp, synthetic construct
  misc_feature 1..155: note = Synthetic
  source 1..155: mol_type = other DNA
atccttccagtcagggccatgtttgagagctagaaatagcaagtttaaataaggctagtccgttatcaacttgaaaaagtgggaccgagtcggtccacctgaaccgtatatcagtccaaagtccagtcctagagtccctatggccctgactggaa

SEQ ID NO: 369 - DNA, 1719 bp, synthetic construct
  misc_feature 1..1719: note = Synthetic
  source 1..1719: mol_type = other DNA
gttcgttgcaacaaattgatgagcaatgcttttttataatgccaactttgtacaaaaaagttggcatgacaagttccaggctttggttttcgctgctgctggcggcagcgttcgcaggacgggcgacggccctctggccctggcctcagaacttccaaacctccgaccagcgctacgtcctttacccgaacaactttcaattccagtacgatgtcagctcggccgcgcagcccggctgctcagtcctcgacgaggccttccagcgctatcgtgacctgcttttcggttccgggtcttggccccgtccttacctcacagggaaacggcatacactggagaagaatgtgttggttgtctctgtagtcacacctggatgtaaccagcttcctactttggagtcagtggagaattataccctgaccataaatgatgaccagtgtttactcctctctgagactgtctggggagctctccgaggtctggagacttttagccagcttgtttggaaatctgctgagggcacattctttatcaacaagactgagattgaggactttccccgctttcctcaccggggcttgctgttggatacatctcgccattacctgccactctctagcatcctggacactctggatgtcatggcgtacaataaattgaacgtgttccactggcatctggtagatgatccttccttcccatatgagagcttcacttttccagagctcatgagaaaggggtcctacaaccctgtcacccacatctacacagcacaggatgtgaaggaggtcattgaatacgcacggctccggggtatccgtgtgcttgcagagtttgacactcctggccacactttgtcctggggaccaggtatccctggattactgactccttgctaccctgggtctgagccctctggcacctttggaccagtgaatcccagtctcaataatacctatgagttcatgagcacattcttcttagaagtcagctctgtcttcccagatttttatcttcatcttggaggagatgaggttgatttcacctgctggaagtccaacccagagatccaggactttatgaggaagaaaggcttcggtgaggacttcaagcagctggagtccttctacatccagacgctgctggacatcgtctcttcttatggcaagggctatgtggtgtggcaggaggtgtttgataataaagtaaagattcagccagacacaatcatacaggtgtggcgagaggatattccagtgaactatatgaaggagctggaactggtcaccaaggccggcttccgggcccttctctctgccccctggtacctgaaccgtatatcctatggccctgactggaaggatttctacgtagtggaacccctggcatttgaaggtacccctgagcagaaggctctggtgattggtggagaggcttgtatgtggggagaatatgtggacaacacaaacctggtccccaggctctggcccagagcaggggctgttgccgaaaggctgtggagcaacaagttgacatctgacctgacatttgcctatgaacgtttgtcacacttccgctgtgagttgctgaggcgaggtgtccaggcccaacccctcaatgtaggcttctgtgagcaggagtttgaacagacctgcccaactttcttgtacaaagttggcattataagaaagcattgcttatcaatttgttgcaacgaac

SEQ ID NO: 370 - protein, 529 aa, synthetic construct
  REGION 1..529: note = Synthetic
MTSSRLWFSLLLAAAFAGRATALWPWPQNFQTSDQRYVLYPNNFQFQYDVSSAAQPGCSVLDEAFQRYRDLLFGSGSWPRPYLTGKRHTLEKNVLVVSVVTPGCNQLPTLESVENYTLTINDDQCLLLSETVWGALRGLETFSQLVWKSAEGTFFINKTEIEDFPRFPHRGLLLDTSRHYLPLSSILDTLDVMAYNKLNVFHWHLVDDPSFPYESFTFPELMRKGSYNPVTHIYTAQDVKEVIEYARLRGIRVLAEFDTPGHTLSWGPGIPGLLTPCYPGSEPSGTFGPVNPSLNNTYEFMSTFFLEVSSVFPDFYLHLGGDEVDFTCWKSNPEIQDFMRKKGFGEDFKQLESFYIQTLLDIVSSYGKGYVVWQEVFDNKVKIQPDTIIQVWREDIPVNYMKELELVTKAGFRALLSAPWYLNRISYGPDWKDFYVVEPLAFEGTPEQKALVIGGEACMWGEYVDNTNLVPRLWPRAGAVAERLWSNKLTSDLTFAYERLSHFRCELLRRGVQAQPLNVGFCEQEFEQT

SEQ ID NO: 371 - DNA, 25 bp, synthetic construct
  misc_feature 1..25: note = Synthetic
  source 1..25: mol_type = other DNA
nnnnntcatcctgataaactgcaaa

SEQ ID NO: 372 - DNA, 82 bp, synthetic construct
  misc_feature 1..82: note = Synthetic
  source 1..82: mol_type = other DNA
nnnnncagtttgtacggatgactgatgagtcccaaataggacgaaacgcgcttcggtgcgtctcatcctgataaactgcaaa

SEQ ID NO: 373 - DNA, 333 bp, synthetic construct
  misc_feature 1..333: note = Synthetic
  source 1..333: mol_type = other DNA
acctgaaccgtatatcgacgcaccgaagcgcgtttcgtcctatttgggactcatcaggatatacggttcaggtgatatacggttcaggtgacgcaccgaagcgcgtttcgtcctatttgggactcatcagacctgaaccgtatatcatccttccagtcagggccatgtttgagagctagaaatagcaagtttaaataaggctagtccgttatcaacttgaaaaagtgggaccgagtcggtccacctgaaccgtatatcgacgcaccgaagcgcgtttcgtcctatttgggactcatcaggatatacggttcaggtctatggccctgactggaa

SEQ ID NO: 374 - DNA, 34 bp, synthetic construct
  misc_feature 1..34: note = Synthetic
  source 1..34: mol_type = other DNA
cctgggtcaatccttggggcccagactgagcacg

SEQ ID NO: 375 - DNA, 51 bp, synthetic construct
  misc_feature 1..51: note = Synthetic
  source 1..51: mol_type = other DNA
cctgggtcaatccttggggcccagactgagcacgtgatggcagaggaaagg

SEQ ID NO: 376 - DNA, 51 bp, synthetic construct
  misc_feature 1..51: note = Synthetic
  source 1..51: mol_type = other DNA
cctttcctctgccatcacgtgctcagtctgggccccaaggattgacccagg

SEQ ID NO: 377 - DNA, 17 bp, synthetic construct
  misc_feature 1..17: note = Synthetic
  source 1..17: mol_type = other DNA
tgatggcagaggaaagg

SEQ ID NO: 378 - DNA, 23 bp, synthetic construct
  misc_feature 1..23: note = Synthetic
  source 1..23: mol_type = other DNA
gcaggctttaaaggaaccaattc

SEQ ID NO: 379 - DNA, 43 bp, synthetic construct
  misc_feature 1..43: note = Synthetic
  source 1..43: mol_type = other DNA
gcaggctttaaaggaaccaattccctgggtcaatccttggggc

SEQ ID NO: 380 - DNA, 20 bp, synthetic construct
  misc_feature 1..20: note = Synthetic
  source 1..20: mol_type = other DNA
ctctggaggatctagcggag

SEQ ID NO: 381 - DNA, 40 bp, synthetic construct
  misc_feature 1..40: note = Synthetic
  source 1..40: mol_type = other DNA
ctctggaggatctagcggagtttttttttttttttttttt

SEQ ID NO: 382 - DNA, 34 bp, synthetic construct
  misc_feature 1..34: note = Synthetic
  source 1..34: mol_type = other DNA
ctctggaggatctagcggagcccccccccccccc

SEQ ID NO: 383 - DNA, 20 bp, synthetic construct
  misc_feature 1..20: note = Synthetic
  source 1..20: mol_type = other DNA
ggcccagactgagcacgtga

SEQ ID NO: 384 - DNA, 20 bp, synthetic construct
  misc_feature 1..20: note = Synthetic
  source 1..20: mol_type = other DNA
ggcccagactgagcacgtga

SEQ ID NO: 385 - DNA, 20 bp, synthetic construct
  misc_feature 1..20: note = Synthetic
  source 1..20: mol_type = other DNA
ggcccagactgagcacgtga

SEQ ID NO: 386 - DNA, 20 bp, synthetic construct
  misc_feature 1..20: note = Synthetic
  source 1..20: mol_type = other DNA
ggcccagactgagcacgtga

SEQ ID NO: 387 - DNA, 20 bp, synthetic construct
  misc_feature 1..20: note = Synthetic
  source 1..20: mol_type = other DNA
ggcccagactgagcacgtga

SEQ ID NO: 388 - DNA, 20 bp, synthetic construct
  misc_feature 1..20: note = Synthetic
  source 1..20: mol_type = other DNA
ggcccagactgagcacgtga

SEQ ID NO: 389 - DNA, 20 bp, synthetic construct
  misc_feature 1..20: note = Synthetic
  source 1..20: mol_type = other DNA
ggcccagactgagcacgtga

SEQ ID NO: 390 - DNA, 20 bp, synthetic construct
  misc_feature 1..20: note = Synthetic
  source 1..20: mol_type = other DNA
ggcccagactgagcacgtga

SEQ ID NO: 391 - DNA, 20 bp, synthetic construct
  misc_feature 1..20: note = Synthetic
  source 1..20: mol_type = other DNA
ggcccagactgagcacgtga

SEQ ID NO: 392 - DNA, 20 bp, synthetic construct
  misc_feature 1..20: note = Synthetic
  source 1..20: mol_type = other DNA
ggcccagactgagcacgtga

SEQ ID NO: 393 - DNA, 20 bp, synthetic construct
  misc_feature 1..20: note = Synthetic
  source 1..20: mol_type = other DNA
ggcccagactgagcacgtga

SEQ ID NO: 394 - DNA, 23 bp, synthetic construct
  misc_feature 1..23: note = Synthetic
  source 1..23: mol_type = other DNA
tctgctatcacgtgctcagtctg

SEQ ID NO: 395 - DNA, 20 bp, synthetic construct
  misc_feature 1..20: note = Synthetic
  source 1..20: mol_type = other DNA
gcacatactagcccctgtct

SEQ ID NO: 396 - protein, 15 aa, synthetic construct
  REGION 1..15: note = Synthetic
QYIKANSKFIGITEL

SEQ ID NO: 397 - DNA, 45 bp, synthetic construct
  misc_feature 1..45: note = Synthetic
  source 1..45: mol_type = other DNA
catgatataaaagcaaattctaaatttataggtataactgaacta

SEQ ID NO: 398 - protein, 535 aa, synthetic construct
  REGION 1..535: note = Synthetic
GADDVVDSSKSFVMENFSSYHGTKPGYVDSIQKGIQKPKSGTQGNYDDDWKEFYSTDNKYDAAGYSVDNENPLSGKAGGVVKVTYPGLTKVLALKVDNAETIKKELGLSLTEPLMEQVGTEEFIKRFGDGASRVVLSLPFAEGSSSVEYINNWEQAKALSVELEINFETRGKRGQDAMYEYMAQACAGNRVRRSVGSSLSCINLDWDVIRDKTKTKIESLKEHGPIKNKMSESPNKTVSEEKAKQYLEEFHQTALEHPELSELKTVTGTNPVFAGANYAAWAVNVAQVIDSETADNLEKTTAALSILPGIGSVMGIADGAVHHNTEEIVAQSIALSSLMVAQAIPLVGELVDIGFAAYNFVESIINLFQVVHNSYNRPAYSPGHKTQPFLHDGYAVSWNTVEDSIIRTGFQGESGHDIKITAENTPLPIAGVLLPTIPGKLDVNKSKTHISVNGRKIRMRCRAIDGDVTFCRPKSPVYVGNGVHANLHVAFHRSSSEKIHSNEISSDSIGVLGYQKTVDHTKVNSKLSLFFEIKS

SEQ ID NO: 399 - DNA, 1605 bp, synthetic construct
  misc_feature 1..1605: note = Synthetic
  source 1..1605: mol_type = other DNA
ggcgccgacgacgtggtggacagcagcaagagcttcgtgatggagaacttcagcagctaccacggcaccaagcccggctacgtggacagcatccagaagggcatccagaagcccaagagcggcacccagggcaactacgacgacgactggaaggagttctacagcaccgacaacaagtacgacgccgccggctacagcgtggacaacgagaaccccctgagcggcaaggccggcggcgtggtgaaggtgacctaccccggcctgaccaaggtgctggccctgaaggtggacaacgccgagaccatcaagaaggagctgggcctgagcctgaccgagcccctgatggagcaggtgggcaccgaggagttcatcaagaggttcggcgacggcgccagcagggtggtgctgagcctgcccttcgccgagggcagcagcagcgtggagtacatcaacaactgggagcaggccaaggccctgagcgtggagctggagatcaacttcgagaccaggggcaagaggggccaggacgccatgtacgagtacatggcccaggcctgcgccggcaacagggtgaggaggagcgtgggcagcagcctgagctgcatcaacctggactgggacgtgatcagggacaagaccaagaccaagatcgagagcctgaaggagcacggccccatcaagaacaagatgagcgagagccccaacaagaccgtgagcgaggagaaggccaagcagtacctggaggagttccaccagaccgccctggagcaccccgagctgagcgagctgaagaccgtgaccggcaccaaccccgtgttcgccggcgccaactacgccgcctgggccgtgaacgtggcccaggtgatcgacagcgagaccgccgacaacctggagaagaccaccgccgccctgagcatcctgcccggcatcggcagcgtgatgggcatcgccgacggcgccgtgcaccacaacaccgaggagatcgtggcccagagcatcgccctgagcagcctgatggtggcccaggccatccccctggtgggcgagctggtggacatcggcttcgccgcctacaacttcgtggagagcatcatcaacctgttccaggtggtgcacaacagctacaacaggcccgcctacagccccggccacaagacccagcccttcctgcacgacggctacgccgtgagctggaacaccgtggaggacagcatcatcaggaccggcttccagggcgagagcggccacgacatcaagatcaccgccgagaacacccccctgcccatcgccggcgtgctgctgcccaccatccccggcaagctggacgtgaacaagagcaagacccacatcagcgtgaacggcaggaagatcaggatgaggtgcagggccatcgacggcgacgtgaccttctgcaggcccaagagccccgtgtacgtgggcaacggcgtgcacgccaacctgcacgtggccttccacaggagcagcagcgagaagatccacagcaacgagatcagcagcgacagcatcggcgtgctgggctaccagaagaccgtggaccacaccaaggtgaacagcaagctgagcctgttcttcgagatcaagagc

SEQ ID NO: 400 - protein, 15 aa, synthetic construct
  REGION 1..15: note = Synthetic
GTYRLIPNARANLTA

SEQ ID NO: 401 - DNA, 45 bp, synthetic construct
  misc_feature 1..45: note = Synthetic
  source 1..45: mol_type = other DNA
ggcacctacaggctgatccccaacgccagggccaacctgaccgcc

SEQ ID NO: 402 - protein, 21 aa, synthetic construct
  REGION 1..21: note = Synthetic
PSKFFTISDSATFAPGPVSNA

SEQ ID NO: 403 - DNA, 63 bp, synthetic construct
  misc_feature 1..63: note = Synthetic
  source 1..63: mol_type = other DNA
ccgagcaaattttttaccattagcgatagcgcgacctttgcgccgggcccggtgagcaacgcg

SEQ ID NO: 404 - protein, 21 aa, synthetic construct
  REGION 1..21: note = Synthetic
PSKLFIMLDNATFAPGPVVNA

SEQ ID NO: 405 - DNA, 63 bp, synthetic construct
  misc_feature 1..63: note = Synthetic
  source 1..63: mol_type = other DNA
ccgagcaaactgtttattatgctggataacgcgacctttgcgccgggcccggtggtgaacgcg

SEQ ID NO: 406 - protein, 27 aa, synthetic construct
  REGION 1..27: note = Synthetic
TPPPYQVSCGGESDRASARVIDPAAQS

SEQ ID NO: 407 - DNA, 81 bp, synthetic construct
  misc_feature 1..81: note = Synthetic
  source 1..81: mol_type = other DNA
accccccccccctaccaggtgagctgcggcggcgagagcgacagggccagcgccagggtgatcgaccccgccgcccagagc

SEQ ID NO: 408 - protein, 134 aa, synthetic construct
  REGION 1..134: note = Synthetic
PEYAYKIVKNKKMEDGFLQGMVDGWYGHHSNEQGSGLMENERTLDKANPNNDLCSWSDHEASSNNTNQEDLLQRESRRKKRIGTSTLNQRGNCNTKCQTEEARLKREEVSLVKSDQCSNGSLQCRANNSTEQVD

SEQ ID NO: 409 - DNA, 402 bp, synthetic construct
  misc_feature 1..402: note = Synthetic
  source 1..402: mol_type = other DNA
cccgagtacgcctacaagatcgtgaagaacaagaagatggaggacggcttcctgcagggcatggtggacggctggtacggccaccacagcaacgagcagggcagcggcctgatggagaacgagaggaccctggacaaggccaaccccaacaacgacctgtgcagctggagcgaccacgaggccagcagcaacaacaccaaccaggaggacctgctgcagagggagagcaggaggaagaagaggatcggcaccagcaccctgaaccagaggggcaactgcaacaccaagtgccagaccgaggaggccaggctgaagagggaggaggtgagcctggtgaagagcgaccagtgcagcaacggcagcctgcagtgcagggccaacaacagcaccgagcaggtggac

SEQ ID NO: 410 - protein, 154 aa, synthetic construct
  REGION 1..154: note = Synthetic
TKSTNSRSGGISGPDNEAPVGEAPSPYGDNPRPNDGNNIRIGSKGYNGIITDTIEESCSCYPDAKVVKSVELDSTIWTSGSSPNQKIITIGWDPNGWTGTPMSPNGAYGTDGPSNGQANQHQAESISAGNSSLCPIRDNWHGSNRSWSWPDGAE

SEQ ID NO: 411 - DNA, 462 bp, synthetic construct
  misc_feature 1..462: note = Synthetic
  source 1..462: mol_type = other DNA
accaagagcaccaacagcaggagcggcggcatcagcggccccgacaacgaggcccccgtgggcgaggcccccagcccctacggcgacaaccccaggcccaacgacggcaacaacatcaggatcggcagcaagggctacaacggcatcatcaccgacaccatcgaggagagctgcagctgctaccccgacgccaaggtggtgaagagcgtggagctggacagcaccatctggaccagcggcagcagccccaaccagaagatcatcaccatcggctgggaccccaacggctggaccggcacccccatgagccccaacggcgcctacggcaccgacggccccagcaacggccaggccaaccagcaccaggccgagagcatcagcgccggcaacagcagcctgtgccccatcagggacaactggcacggcagcaacaggagctggagctggcccgacggcgccgag

SEQ ID NO: 412 - protein, 45 aa, synthetic construct
  REGION 1..45: note = Synthetic
EKIVLLLAMMEKIVLLLAKCQTPMGAIKAVDGVTNKCPYLGSPSF

SEQ ID NO: 413 - DNA, 135 bp, synthetic construct
  misc_feature 1..135: note = Synthetic
  source 1..135: mol_type = other DNA
gagaagatcgtgctgctgctggccatgatggagaagatcgtgctgctgctggccaagtgccagacccccatgggcgccatcaaggccgtggacggcgtgaccaacaagtgcccctacctgggcagccccagcttc

SEQ ID NO: 414 - protein, 36 aa, synthetic construct
  REGION 1..36: note = Synthetic
IRPCFWVELNPNQKIITIRPCFWVELICYPDAGEIT

SEQ ID NO: 415 - DNA, 108 bp, synthetic construct
  misc_feature 1..108: note = Synthetic
  source 1..108: mol_type = other DNA
atcaggccctgcttctgggtggagctgaaccccaaccagaagatcatcaccatcaggccctgcttctgggtggagctgatctgctaccccgacgccggcgagatcacc

SEQ ID NO: 416 - protein, 45 aa, synthetic construct
  REGION 1..45: note = Synthetic
MEKIVLLLAEKIVLLLAMCPYLGSPSFKCQTPMGAIKAVDGVTNK

SEQ ID NO: 417 - DNA, 135 bp, synthetic construct
  misc_feature 1..135: note = Synthetic
  source 1..135: mol_type = other DNA
atggagaagatcgtgctgctgctggccgagaagatcgtgctgctgctggccatgtgcccctacctgggcagccccagcttcaagtgccagacccccatgggcgccatcaaggccgtggacggcgtgaccaacaag

SEQ ID NO: 418 - protein, 36 aa, synthetic construct
  REGION 1..36: note = Synthetic
NPNQKIITICYPDAGEITIRPCFWVELRPCFWVELI

SEQ ID NO: 419 - DNA, 108 bp, synthetic construct
  misc_feature 1..108: note = Synthetic
  source 1..108: mol_type = other DNA
aaccccaaccagaagatcatcaccatctgctaccccgacgccggcgagatcaccatcaggccctgcttctgggtggagctgaggccctgcttctgggtggagctgatc

SEQ ID NO: 420 - protein, 18 aa, synthetic construct
  REGION 1..18: note = Synthetic
MVSLVKSDQIGTSTLNQR

SEQ ID NO: 421 - DNA, 54 bp, synthetic construct
  misc_feature 1..54: note = Synthetic
  source 1..54: mol_type = other DNA
atggtgagcctggtgaagagcgaccagatcggcaccagcaccctgaaccagagg

SEQ ID NO: 422 - protein, 9 aa, synthetic construct
  REGION 1..9: note = Synthetic
YNGIITDTI

SEQ ID NO: 423 - DNA, 27 bp, synthetic construct
  misc_feature 1..27: note = Synthetic
  source 1..27: mol_type = other DNA
tacaacggcatcatcaccgacaccatc

SEQ ID NO: 424 - protein, 63 aa, synthetic construct
  REGION 1..63: note = Synthetic
MEKIVLLLAEKIVLLLAMMVSLVKSDQCPYLGSPSFIGTSTLNQRKCQTPMGAIKAVDGVTNK

SEQ ID NO: 425 - DNA, 135 bp, synthetic construct
  misc_feature 1..135: note = Synthetic
  source 1..135: mol_type = other DNA
atggagaagatcgtgctgctgctggccgagaagatcgtgctgctgctggccatgatggtgagcctggtgaagagcgaccagtgcccctacctgggcagccccagcttcatcggcaccagcaccctgaaccagagg

SEQ ID NO: 426 - protein, 45 aa, synthetic construct
  REGION 1..45: note = Synthetic
NPNQKIITIYNGIITDTICYPDAGEITIRPCFWVELRPCFWVELI

SEQ ID NO: 427 - DNA, 135 bp, synthetic construct
  misc_feature 1..135: note = Synthetic
  source 1..135: mol_type = other DNA
aaccccaaccagaagatcatcaccatctacaacggcatcatcaccgacaccatctgctaccccgacgccggcgagatcaccatcaggccctgcttctgggtggagctgaggccctgcttctgggtggagctgatc

SEQ ID NO: 428 - protein, 535 aa, synthetic construct; identical to SEQ ID NO: 398
  REGION 1..535: note = Synthetic

SEQ ID NO: 429 - DNA, 27 bp, synthetic construct
  misc_feature 1..27: note = Synthetic
  source 1..27: mol_type = other DNA
ggctaaccgtgccatttgatcaggtca

SEQ ID NO: 430 - DNA, 27 bp, synthetic construct
  misc_feature 1..27: note = Synthetic
  source 1..27: mol_type = other DNA
ggctaaccgtgcaaattaacaaactaa

SEQ ID NO: 431 - DNA, 28 bp, synthetic construct
  misc_feature 1..28: note = Synthetic
  source 1..28: mol_type = other DNA
ggccatctcgtgcaaattaacaaactaa

SEQ ID NO: 432 - DNA, 35 bp, synthetic construct
  misc_feature 1..35: note = Synthetic
  source 1..35: mol_type = other DNA
ggtcctctgccatctcgtgcaaattaacaaactaa

SEQ ID NO: 433 - DNA, 42 bp, synthetic construct
  misc_feature 1..42: note = Synthetic
  source 1..42: mol_type = other DNA
ggcttcctttcctctgccatctcgtgcaaattaacaaactaa

SEQ ID NO: 434 - DNA, 27 bp, synthetic construct
  misc_feature 1..27: note = Synthetic
  source 1..27: mol_type = other DNA
ggctaaccgtgccatttgatcaggtca

SEQ ID NO: 435 - DNA, 27 bp, synthetic construct
  misc_feature 1..27: note = Synthetic
  source 1..27: mol_type = other DNA
ggctaaccgtgcaaattaacaaactaa

SEQ ID NO: 436 - DNA, 28 bp, synthetic construct
  misc_feature 1..28: note = Synthetic
  source 1..28: mol_type = other DNA
ggccatctcgtgcaaattaacaaactaa

SEQ ID NO: 437 - DNA, 35 bp, synthetic construct; identical to SEQ ID NO: 432
  misc_feature 1..35: note = Synthetic
  source 1..35: mol_type = other DNA

SEQ ID NO: 438 - DNA, 42 bp, synthetic construct; identical to SEQ ID NO: 433
  misc_feature 1..42: note = Synthetic
  source 1..42: mol_type = other DNA

SEQ ID NO: 439 - DNA, 17 bp, synthetic construct
  misc_feature 1..17: note = Synthetic
  source 1..17: mol_type = other DNA
tctgccatctcgtgctc

SEQ ID NO: 440 - DNA, 17 bp, synthetic construct
  misc_feature 1..17: note = Synthetic
  source 1..17: mol_type = other DNA
tctgccatctcgtgctc

SEQ ID NO: 441 - DNA, 18 bp, synthetic construct
  misc_feature 1..18: note = Synthetic
  source 1..18: mol_type = other DNA
tctgccatcatcgtgctc

SEQ ID NO: 442 - DNA, 16 bp, synthetic construct
  misc_feature 1..16: note = Synthetic
  source 1..16: mol_type = other DNA
tctgccatccgtgctc

SEQ ID NO: 443 - protein, 1517 aa, Streptococcus pyogenes
MKRTADGSEFESPKKKRKVDKKYSIGLDIGTNSVGWAVITDEYKVPSKKFKVLGNTDRHSIKKNLIGALLFDSGETAEATRLKRTARRRYTRRKNRICYLQEIFSNEMAKVDDSFFHRLEESFLVEEDKKHERHPIFGNIVDEVAYHEKYPTIYHLRKKLVDSTDKADLRLIYLALAHMIKFRGHFLIEGDLNPDNSDVDKLFIQLVQTYNQLFEENPINASGVDAKAILSARLSKSRRLENLIAQLPGEKKNGLFGNLIALSLGLTPNFKSNFDLAEDAKLQLSKDTYDDDLDNLLAQIGDQYADLFLAAKNLSDAILLSDILRVNTEITKAPLSASMIKRYDEHHQDLTLLKALVRQQLPEKYKEIFFDQSKNGYAGYIDGGASQEEFYKFIKPILEKMDGTEELLVKLNREDLLRKQRTFDNGSIPHQIHLGELHAILRRQEDFYPFLKDNREKIEKILTFRIPYYVGPLARGNSRFAWMTRKSEETITPWNFEEVVDKGASAQSFIERMTNFDKNLPNEKVLPKHSLLYEYFTVYNELTKVKYVTEGMRKPAFLSGEQKKAIVDLLFKTNRKVTVKQLKEDYFKKIECFDSVEISGVEDRFNASLGTYHDLLKIIKDKDFLDNEENEDILEDIVLTLTLFEDREMIEERLKTYAHLFDDKVMKQLKRRRYTGWGRLSRKLINGIRDKQSGKTILDFLKSDGFANRNFMQLIHDDSLTFKEDIQKAQVSGQGDSLHEHIANLAGSPAIKKGILQTVKVVDELVKVMGRHKPENIVIEMARENQTTQKGQKNSRERMKRIEEGIKELGSQILKEHPVENTQLQNEKLYLYYLQNGRDMYVDQELDINRLSDYDVDAIVPQSFLKDDSIDNKVLTRSDKNRGKSDNVPSEEVVKKMKNYWRQLLNAKLITQRKFDNLTKAERGGLSELDKAGFIKRQLVETRQITKHVAQILDSRMNTKYDENDKLIREVKVITLKSKLVSDFRKDFQFYKVREINNYHHAHDAYLNAVVGTALIKKYPKLESEFVYGDYKVYDVRKMIAKSEQEIGKATAKYFFYSNIMNFFKTEITLANGEIRKRPLIETNGETGEIVWDKGRDFATVRKVLSMPQVNIVKKTEVQTGGFSKESILPKRNSDKLIARKKDWDPKKYGGFDSPTVAYSVLVVAKVEKGKSKKLKSVKELLGITIMERSSFEKNPIDFLEAKGYKEVKKDLIIKLPKYSLFELENGRKRMLASAGELQKGNELALPSKYVNFLYLASHYEKLKGSPEDNEQKQLFVEQHKHYLDEIIEQISEFSKRVILADANLDKVLSAYNKHRDKPIREQAENIIHLFTLTNLGAPAAFKYFDTTIDRKRYTSTKEVLDATLIHQSITGLYETRIDLSQLGGDSGGSSGGSCLSYETEILTVEYGLLPIGKIVEKRIECTVYSVDNNGNIYTQPVAQWHDRGEQEVFEYCLEDGSLIRATKDHKFMTVDGQMLPIDEIFERELDLMRVDNLPNSGGSKRTADGSEFEPKKKRKV

SEQ ID NO: 444 - skipped

SEQ ID NO: 445 - protein, 1367 aa, Streptococcus pyogenes; identical to SEQ ID NO: 55

SEQ ID NO: 446 - protein, 8 aa, synthetic construct
  REGION 1..8: note = Synthetic
SGGSSGGS

SEQ ID NO: 447 - protein, 106 aa, synthetic construct
  REGION 1..106: note = Synthetic
CLSYETEILTVEYGLLPIGKIVEKRIECTVYSVDNNGNIYTQPVAQWHDRGEQEVFEYCLEDGSLIRATKDHKFMTVDGQMLPIDEIFERELDLMRVDNLPNSGGS

SEQ ID NO: 448-449 - skipped (2 entries)

SEQ ID NO: 450 - protein, 780 aa, unidentified
  source 1..780: note = Staphylococcus pyogenes
MKRTADGSEFESPKKKRKVIKIATRKYLGKQNVYDIGVERDHNFALKNGFIASNCFNSGSETPGTSESATPESSGGSSGGSSTLNIEDEYRLHETSKEPDVSLGSTWLSDFPQAWAETGGMGLAVRQAPLIIPLKATSTPVSIKQYPMSQEARLGIKPHIQRLLDQGILVPCQSPWNTPLLPVKKPGTNDYRPVQDLREVNKRVEDIHPTVPNPYNLLSGLPPSHQWYTVLDLKDAFFCLRLHPTSQPLFAFEWRDPEMGISGQLTWTRLPQGFKNSPTLFDEALHRDLADFRIQHPDLILLQYVDDLLLAATSELDCQQGTRALLQTLGNLGYRASAKKAQICQKQVKYLGYLLKEGQRWLTEARKETVMGQPTPKTPRQLREFLGTAGFCRLWIPGFAEMAAPLYPLTKTGTLFNWGPDQQKAYQEIKQALLTAPALGLPDLTKPFELFVDEKQGYAKGVLTQKLGPWRRPVAYLSKKLDPVAAGWPPCLRMVAAIAVLTKDAGKLTMGQPLVILAPHAVEALVKQPPDRWLSNARMTHYQALLLDTDRVQFGPVVALNPATLLPLPEEGLQHNCLDILAEAHGTRPDLTDQPLPDADHTWYTDGSSLLQEGQRKAGAAVTTETEVIWAKALPAGTSAQRAELIALTQALKMAEGKKLNVYTDSRYAFATAHIHGEIYRRRGLLTSEGKEIKNKDEILALLKALFLPKRLSIIHCPGHQKGHSAEARGNRMADQAARKAAITETPDTSTLLIENSSPSGGSKRTADGSEFEPKKKRKV

SEQ ID NO: 451 - skipped

SEQ ID NO: 452 - protein, 35 aa, synthetic construct
  REGION 1..35: note = Synthetic
IKIATRKYLGKQNVYDIGVERDHNFALKNGFIASN

SEQ ID NO: 453 - protein, 28 aa, synthetic construct
  REGION 1..28: note = Synthetic
CFNSGSETPGTSESATPESSGGSSGGSS

SEQ ID NO: 454 - protein, 677 aa, unidentified; identical to SEQ ID NO: 89
  REGION 1..677: note = moloney murine leukemia virus

SEQ ID NO: 455 - DNA, 21 bp, synthetic construct
  misc_feature 1..21: note = Synthetic
  source 1..21: mol_type = other DNA
gtgccatcacgtgctcagtct

SEQ ID NO: 456 - DNA, 21 bp, synthetic construct
  misc_feature 1..21: note = Synthetic
  source 1..21: mol_type = other DNA
gagcgatccaggtgctgcaga

SEQ ID NO: 457 - DNA, 20 bp, synthetic construct
  misc_feature 1..20: note = Synthetic
  source 1..20: mol_type = other DNA
ggagcccttcttcttctgct

SEQ ID NO: 458 - protein, 881 aa, Staphylococcus aureus
MKRTADGSEFESPKKKRKVGKRNYILGLAIGITSVGYGIIDYETRDVIDAGVRLFKEANVENNEGRRSKRGARRLKRRRRHRIQRVKKLLFDYNLLTDHSELSGINPYEARVKGLSQKLSEEEFSAALLHLAKRRGVHNVNEVEEDTGNELSTKEQISRNSKALEEKYVAELQLERLKKDGEVRGSINRFKTSDYVKEAKQLLKVQKAYHQLDQSFIDTYIDLLETRRTYYEGPGEGSPFGWKDIKEWYEMLMGHCTYFPEELRSVKYAYNADLYNALNDLNNLVITRDENEKLEYYEKFQIIENVFKQKKKPTLKQIAKEILVNEEDIKGYRVTSTGKPEFTNLKVYHDIKDITARKEIIENAELLDQIAKILTIYQSSEDIQEELTNLNSELTQEEIEQISNLKGYTGTHNLSLKAINLILDELWHTNDNQIAIFNRLKLVPKKVDLSQQKEIPTTLVDDFILSPVVKRSFIQSIKVINAIIKKYGLPNDIIIELAREKNSKDAQKMINEMQKRNRQTNERIEEIIRTTGKENAKYLIEKIKLHDMQEGKCLYSLEAIPLEDLLNNPFNYEVDHIIPRSVSFDNSFNNKVLVKQEENSKKGNRTPFQYLSSSDSKISYETFKKHILNLAKGKGRISKTKKEYLLEERDINRFSVQKDFINRNLVDTRYATRGLMNLLRSYFRVNNLDVKVKSINGGFTSFLRRKWKFKKERNKGYKHHAEDALIIANADFIFKEWKKLDKAKKVMENQMFEEKQAECLSYETEILTVEYGLLPIGKIVEKRIECTVYSVDNNGNIYTQPVAQWHDRGEQEVFEYCLEDGSLIRATKDHKFMTVDGQMLPIDEIFERELDLMRVDNLPNSGGSKRTADGSEFEPKKKRKV

SEQ ID NO: 459 - skipped

SEQ ID NO: 460 - protein, 739 aa, synthetic construct
  REGION 1..739: note = Synthetic
GKRNYILGLAIGITSVGYGIIDYETRDVIDAGVRLFKEANVENNEGRRSKRGARRLKRRRRHRIQRVKKLLFDYNLLTDHSELSGINPYEARVKGLSQKLSEEEFSAALLHLAKRRGVHNVNEVEEDTGNELSTKEQISRNSKALEEKYVAELQLERLKKDGEVRGSINRFKTSDYVKEAKQLLKVQKAYHQLDQSFIDTYIDLLETRRTYYEGPGEGSPFGWKDIKEWYEMLMGHCTYFPEELRSVKYAYNADLYNALNDLNNLVITRDENEKLEYYEKFQIIENVFKQKKKPTLKQIAKEILVNEEDIKGYRVTSTGKPEFTNLKVYHDIKDITARKEIIENAELLDQIAKILTIYQSSEDIQEELTNLNSELTQEEIEQISNLKGYTGTHNLSLKAINLILDELWHTNDNQIAIFNRLKLVPKKVDLSQQKEIPTTLVDDFILSPVVKRSFIQSIKVINAIIKKYGLPNDIIIELAREKNSKDAQKMINEMQKRNRQTNERIEEIIRTTGKENAKYLIEKIKLHDMQEGKCLYSLEAIPLEDLLNNPFNYEVDHIIPRSVSFDNSFNNKVLVKQEENSKKGNRTPFQYLSSSDSKISYETFKKHILNLAKGKGRISKTKKEYLLEERDINRFSVQKDFINRNLVDTRYATRGLMNLLRSYFRVNNLDVKVKSINGGFTSFLRRKWKFKKERNKGYKHHAEDALIIANADFIFKEWKKLDKAKKVMENQMFEEKQAE

SEQ ID NO: 461 - skipped

SEQ ID NO: 462 - protein, 102 aa, synthetic construct
  REGION 1..102: note = Synthetic
CLSYETEILTVEYGLLPIGKIVEKRIECTVYSVDNNGNIYTQPVAQWHDRGEQEVFEYCLEDGSLIRATKDHKFMTVDGQMLPIDEIFERELDLMRVDNLPN

SEQ ID NO: 463-464 - skipped (2 entries)

SEQ ID NO: 465 - protein, 1099 aa, Staphylococcus aureus
MKRTADGSEFESPKKKRKVIKIATRKYLGKQNVYDIGVERDHNFALKNGFIASNCFNEIETEQEYKEIFITPHQIKHIKDFKDYKYSHRVDKKPNRKLINDTLYSTRKDDKGNTLIVNNLNGLYDKDNDKLKKLINKSPEKLLMYHHDPQTYQKLKLIMEQYGDEKNPLYKYYEETGNYLTKYSKKDNGPVIKKIKYYGNKLNAHLDITDDYPNSRNKVVKLSLKPYRFDVYLDNGVYKFVTVKNLDVIKKENYYEVNSKCYEEAKKLKKISNQAEFIASFYKNDLIKINGELYRVIGVNNDLLNRIEVNMIDITYREYLENMNDKRPPHIIKTIASKTQSIKKYSTDILGNLYEVKSKKHPQIIKKGSGGSSGGSSGSETPGTSESATPESSGGSSGGSSTLNIEDEYRLHETSKEPDVSLGSTWLSDFPQAWAETGGMGLAVRQAPLIIPLKATSTPVSIKQYPMSQEARLGIKPHIQRLLDQGILVPCQSPWNTPLLPVKKPGTNDYRPVQDLREVNKRVEDIHPTVPNPYNLLSGLPPSHQWYTVLDLKDAFFCLRLHPTSQPLFAFEWRDPEMGISGQLTWTRLPQGFKNSPTLFDEALHRDLADFRIQHPDLILLQYVDDLLLAATSELDCQQGTRALLQTLGNLGYRASAKKAQICQKQVKYLGYLLKEGQRWLTEARKETVMGQPTPKTPRQLREFLGTAGFCRLWIPGFAEMAAPLYPLTKTGTLFNWGPDQQKAYQEIKQALLTAPALGLPDLTKPFELFVDEKQGYAKGVLTQKLGPWRRPVAYLSKKLDPVAAGWPPCLRMVAAIAVLTKDAGKLTMGQPLVILAPHAVEALVKQPPDRWLSNARMTHYQALLLDTDRVQFGPVVALNPATLLPLPEEGLQHNCLDILAEAHGTRPDLTDQPLPDADHTWYTDGSSLLQEGQRKAGAAVTTETEVIWAKALPAGTSAQRAELIALTQALKMAEGKKLNVYTDSRYAFATAHIHGEIYRRRGLLTSEGKEIKNKDEILALLKALFLPKRLSIIHCPGHQKGHSAEARGNRMADQAARKAAITETPDTSTLLIENSSPSGGSKRTADGSEFEPKKKRKV

SEQ ID NO: 466 - skipped

SEQ ID NO: 467 - protein, 314 aa, synthetic construct
  REGION 1..314: note = Synthetic
CFNEIETEQEYKEIFITPHQIKHIKDFKDYKYSHRVDKKPNRKLINDTLYSTRKDDKGNTLIVNNLNGLYDKDNDKLKKLINKSPEKLLMYHHDPQTYQKLKLIMEQYGDEKNPLYKYYEETGNYLTKYSKKDNGPVIKKIKYYGNKLNAHLDITDDYPNSRNKVVKLSLKPYRFDVYLDNGVYKFVTVKNLDVIKKENYYEVNSKCYEEAKKLKKISNQAEFIASFYKNDLIKINGELYRVIGVNNDLLNRIEVNMIDITYREYLENMNDKRPPHIIKTIASKTQSIKKYSTDILGNLYEVKSKKHPQIIKKG

SEQ ID NO: 468-470 - skipped (3 entries)

SEQ ID NO: 471 - protein, 677 aa, unidentified; identical to SEQ ID NO: 89
  REGION 1..677: note = moloney murine leukemia virus

SEQ ID NO: 472 - protein, 413 aa, synthetic construct; identical to SEQ ID NO: 8
  REGION 1..413: note = Synthetic

SEQ ID NO: 473 - protein, 413 aa, synthetic construct; identical to SEQ ID NO: 9
  REGION 1..413: note = Synthetic

SEQ ID NO: 474 - protein, 413 aa, synthetic construct; identical to SEQ ID NO: 10
  REGION 1..413: note = Synthetic

SEQ ID NO: 475 - protein, 413 aa, synthetic construct; identical to SEQ ID NO: 11
  REGION 1..413: note = Synthetic

SEQ ID NO: 476 - protein, 413 aa, synthetic construct; identical to SEQ ID NO: 12
  REGION 1..413: note = Synthetic

SEQ ID NO: 477 - protein, 413 aa, synthetic construct; identical to SEQ ID NO: 13
  REGION 1..413: note = Synthetic

SEQ ID NO: 478 - protein, 413 aa, synthetic construct; identical to SEQ ID NO: 14
  REGION 1..413: note = Synthetic

SEQ ID NO: 479 - protein, 413 aa, synthetic construct; identical to SEQ ID NO: 15
  REGION 1..413: note = Synthetic

SEQ ID NO: 480-486 - skipped (7 entries)

SEQ ID NO: 487 - protein, 240 aa, Homo sapiens
MANLGCWMLVLFVATWSDLGLCKKRPKPGGWNTGGSRYPGQGSPGGNRYPPQGGGGWGQPHGGGWGQPHGGGWGQPHGGGWGQPHGGGWGQGGGTHSQWNKPSKPKTNMKHMAGAAAAGAVVGGLGGYMLGSAMSRPIIHFGSDYEDRYYRENMHRYPNQVYYRPMDEYSNQNNFVHDCVNITIKQHTVTTTTKGENFTETDVKMMERVVEQMCITQYERESQAYYQRGSSMVLFSSPPV

SEQ ID NO: 488 - protein, 108 aa, synthetic construct
  REGION 1..108: note = Synthetic
MGVQVETISPGDGRTFPKRGQTCVVHYTGMLEDGKKFDSSRDRNKPFKFMLGKQEVIRGWEEGVAQMSVGQRAKLTISPDYAYGATGHPGIIPPHATLVFDVELLKLE

SEQ ID NO: 489 - protein, 108 aa, synthetic construct
  REGION 1..108: note = Synthetic
MGVQVETISPGDGRTFPKRGQTCVVHYTGMLEDGKKVDSSRDRNKPFKFMLGKQEVIRGWEEGVAQMSVGQRAKLTISPDYAYGATGHPGIIPPHATLVFDVELLKLE

SEQ ID NO: 490 - protein, 165 aa, synthetic construct
  REGION 1..165: note = Synthetic
MVNPTVFFDIAVDGEPLGRVSFELFADKVPKTAENFRALSTGEKGFGYKGSCFHRIIPGFMCQGGDFTRHNGTGGKSIYGEKFEDENFILKHTGPGILSMANAGPNTNGSQFFICTAKTEWLDGKHVVFGKVKEGMNIVEAMERFGSRNGKTSKKITIADCGQLE

SEQ ID NO: 491 - protein, 108 aa, synthetic construct; identical to SEQ ID NO: 488
  REGION 1..108: note = Synthetic

SEQ ID NO: 492 - skipped

SEQ ID NO: 493 - protein, 216 aa, Homo sapiens
MLRLSERNMKVLLAAALIAGSVFFLLLPGPSAADEKKKGPKVTVKVYFDLRIGDEDVGRVIFGLFGKTVPKTVDNFVALATGEKGFGYKNSKFHRVIKDFMIQGGDFTRGDGTGGKSIYGERFPDENFKLKHYGPGWVSMANAGKDTNGSQFFITTVKTAWLDGKHVVFGKVLEGMEVVRKVESTKTDSRDKPLKDVIIADCGKIEVEKPFAIAKE

SEQ ID NO: 494 - protein, 212 aa, Mus musculus
MSPGPRLLLPAVLCLGLGALVSSSGSSGVRKRGPSVTDKVFFDVRIGDKDVGRIVIGLFGNVVPKTVENFVALATGEKGYGYKGSIFHRVIKDFMIQGGDFTARDGTGGMSIYGETFPDENFKLKHYGIGWVSMANAGPDTNGSQFFITLTKPTWLDGKHVVFGKVLDGMTVVHSIELQATDGHDRPLTDCTIVNSGKIDVKTPFVVEVPDW

SEQ ID NO: 495 - protein, 108 aa, synthetic construct; identical to SEQ ID NO: 489
  REGION 1..108: note = Synthetic

SEQ ID NO: 496 - protein, 187 aa, Homo sapiens
MVGSLNCIVAVSQNMGIGKNGDLPWPPLRNEFRYFQRMTTTSSVEGKQNLVIMGKKTWFSIPEKNRPLKGRINLVLSRELKEPPQGAHFLSRSLDDALKLTEQPELANKVDMVWIVGGSSVYKEAMNHPGHLKLFVTRIMQDFESDTFFPEIDLEKYKLLPEYPGVLSDVQEEKGIKYKFEVYEKND

SEQ ID NO: 497 - protein, 159 aa, Escherichia coli [sequence omitted]

SEQ ID NO: 498 - protein, 777 aa, Homo sapiens
MDSKESLTPGREENPSSVLAQERGDVMDFYKTLRGGATVKVSASSPSLAVASQSDSKQRRLLVDFPKGSVSNAQQPDLSKAVSLSMGLYMGETETKVMGNDLGFPQQGQISLSSGETDLKLLEESIANLNRSTSVPENPKSSASTAVSAAPTEKEFPKTHSDVSSEQQHLKGQTGTNGGNVKLYTTDQSTFDILQDLEFSSGSPGKETNESPWRSDLLIDENCLLSPLAGEDDSFLLEGNSNEDCKPLILPDTKPKIKDNGDLVLSSPSNVTLPQVKTEKEDFIELCTPGVIKQEKLGTVYCQASFPGANIIGNKMSAISVHGVSTSGGQMYHYDMNTASLSQQQDQKPIFNVIPPIPVGSENWNRCQGSGDDNLTSLGTLNFPGRTVFSNGYSSPSMRPDVSSPPSSSSTATTGPPPKLCLVCSDEASGCHYGVLTCGSCKVFFKRAVEGQHNYLCAGRNDCIIDKIRRKNCPACRYRKCLQAGMNLEARKTKKKIKGIQQATTGVSQETSENPGNKTIVPATLPQLTPTLVSLLEVIEPEVLYAGYDSSVPDSTWRIMTTLNMLGGRQVIAAVKWAKAIPGFRNLHLDDQMTLLQYSWMFLMAFALGWRSYRQSSANLLCFAPDLIINEQRMTLPCMYDQCKHMLYVSSELHRLQVSYEEYLCMKTLLLLSSVPKDGLKSQELFDEIRMTYIKELGKAIVKREGNSSQNWQRFYQLTKLLDSMHEVVENLLNYCFQTFLDKTMSIEFPEMLAEIITNQIPKYSNGNIKKLLFHQK

SEQ ID NO: 499 - RNA, 452 nt, synthetic construct
  misc_feature 1..452: note = Synthetic
  source 1..452: mol_type = other RNA
cacggtaggcactgttaggagttttagagctagaaatagcaagttaaaataaggctagtccgttatcaacttgaaaaagtggcaccgagtcggtgcttgcctcggtccaatccttccggagtgcaggtggaaaccatctccccaggagacgggcgcaccttccccaagcgcggccagacctgcgtggtgcactacaccgggatgcttgaagatggaaagaaatttgattcctcccgggacagaaacaagccctttaagtttatgctaggcaagcaggaggtgatccgaggctgggaagaaggggttgcccagatgagtgtgggtcagagagccaaactgactatatctccagattatgcctatggtgccactgggcacccaggcatcatcccaccacatgccactctcgtcttcgatgtggagcttctaaaactggaataacagtgcctacc

SEQ ID NO: 500 - DNA, 464 bp, synthetic construct
  misc_feature 1..464: note = Synthetic
  source 1..464: mol_type = other DNA
ggcccagactgagcacgtgagttttagagctagaaatagcaagttaaaataaggctagtccgttatcaacttgaaaaagtggcaccgagtcggtgctggaggaagcagggcttcctttcctctgccatcattccagttttagaagctccacatcgaagacgagagtggcatgtggtgggatgatgcctgggtgcccagtggcaccataggcataatctggagatatagtcagtttggctctctgacccacactcatctgggcaaccccttcttcccagcctcggatcacctcctgcttgcctagcataaacttaaagggcttgtttctgtcccgggaggaatcaaatttctttccatcttcaagcatcccggtgtagtgcaccacgcaggtctggccgcgcttggggaaggtgcgcccgtctcctggggagatggtttccacctgcactcccgtgctcagtctg

SEQ ID NO: 501-505 - skipped (5 entries)

SEQ ID NO: 506 - DNA, 20 bp, synthetic construct
  misc_feature 1..20: note = Synthetic
  source 1..20: mol_type = other DNA
ggcccagactgagcacgtga

SEQ ID NO: 507 - DNA, 20 bp, synthetic construct
  misc_feature 1..20: note = Synthetic
  source 1..20: mol_type = other DNA
ggcccagactgagcacgtga

SEQ ID NO: 508 - DNA, 20 bp, synthetic construct
  misc_feature 1..20: note = Synthetic
  source 1..20: mol_type = other DNA
ggcccagactgagcacgtga

SEQ ID NO: 509 - DNA, 20 bp, synthetic construct
  misc_feature 1..20: note = Synthetic
  source 1..20: mol_type = other DNA
ggcccagactgagcacgtga

SEQ ID NO: 510 - DNA, 20 bp, synthetic construct
  misc_feature 1..20: note = Synthetic
  source 1..20: mol_type = other DNA
ggcccagactgagcacgtga

SEQ ID NO: 511 - DNA, 20 bp, synthetic construct
  misc_feature 1..20: note = Synthetic
  source 1..20: mol_type = other DNA
ggcactgcggctggaggtgg

SEQ ID NO: 512 - DNA, 20 bp, synthetic construct
  misc_feature 1..20: note = Synthetic
  source 1..20: mol_type = other DNA
gagtccgagcagaagaagaa

SEQ ID NO: 513 - DNA, 20 bp, synthetic construct
  misc_feature 1..20: note = Synthetic
  source 1..20: mol_type = other DNA
ggaatcccttctgcagcacc

SEQ ID NO: 514-516 - skipped (3 entries)

SEQ ID NO: 517 - DNA, 34 bp, synthetic construct
  misc_feature 1..34: note = Synthetic
  source 1..34: mol_type = other DNA
ataacttcgtatagcatacattatacgaagttat

SEQ ID NO: 518 - DNA, 32 bp, synthetic construct
  misc_feature 1..32: note = Synthetic
  source 1..32: mol_type = other DNA
taactttaaataatgccaattatttaaagtta

SEQ ID NO: 519 - DNA, 34 bp, synthetic construct
  misc_feature 1..34: note = Synthetic
  source 1..34: mol_type = other DNA
tcaatttctgagaactgtcattctcggaaattga

SEQ ID NO: 520 - DNA, 34 bp, synthetic construct
  misc_feature 1..34: note = Synthetic
  source 1..34: mol_type = other DNA
ctcgtgtccgataactgtaattatcggacatgat

SEQ ID NO: 521 - DNA, 34 bp, synthetic construct
  misc_feature 1..34: note = Synthetic
  source 1..34: mol_type = other DNA
gaagttcctattctctagaaagtataggaacttc

SEQ ID NO: 522 - DNA, 39 bp, synthetic construct
  misc_feature 1..39: note = Synthetic
  source 1..39: mol_type = other DNA
gagtttcattaaggaataactaattccctaatgaaactc

SEQ ID NO: 523 - DNA, 33 bp, synthetic construct
  misc_feature 1..33: note = Synthetic
  source 1..33: mol_type = other DNA
ggttgcttaagaataagtaattcttaagcaacc

SEQ ID NO: 524 - DNA, 43 bp, synthetic construct
  misc_feature 1..43: note = Synthetic
  source 1..43: mol_type = other DNA
acgaaaaatggtaaggaatagaccattccttaccatttttggt

SEQ ID NO: 525 - DNA, 31 bp, synthetic construct
  misc_feature 1..31: note = Synthetic
  source 1..31: mol_type = other DNA
ttgatgaaagaataacgtattctttcatcaa

SEQ ID NO: 526 - DNA, 33 bp, synthetic construct
  misc_feature 1..33: note = Synthetic
  source 1..33: mol_type = other DNA
gtgcgtcaaataataacgtattatttgacactt

SEQ ID NO: 527 - DNA, 34 bp, synthetic construct
  misc_feature 1..34: note = Synthetic
  source 1..34: mol_type = other DNA
aataggtctgagaacgcccattctcagacgtatt

SEQ ID NO: 528 - DNA, 34 bp, synthetic construct
  misc_feature 1..34: note = Synthetic
  source 1..34: mol_type = other DNA
tgaatgtcctataattacacttataggacattca

SEQ ID NO: 529 - DNA, 34 bp, synthetic construct
  misc_feature 1..34: note = Synthetic
  source 1..34: mol_type = other DNA
gaaactttaaataataagtcttatttaaagtttc

SEQ ID NO: 530 - DNA, 61 bp, synthetic construct
  misc_feature 1..61: note = Synthetic
  source 1..61: mol_type = other DNA
aaacgatatcagacatttgtctgataatgcttcattatcagacaaatgtctgatatcgttt

SEQ ID NO: 531 - DNA, 34 bp, synthetic construct
  misc_feature 1..34: note = Synthetic
  source 1..34: mol_type = other DNA
atatatacgtatatagacatatatacgtatatat

SEQ ID NO: 532 - DNA, 34 bp, synthetic construct
  misc_feature 1..34: note = Synthetic
  source 1..34: mol_type = other DNA
ataactctatataatgtatgctatatagagttat

SEQ ID NO: 533 - DNA, 34 bp, synthetic construct
  misc_feature 1..34: note = Synthetic
  source 1..34: mol_type = other DNA
acaacatcctattacaccctatatgccaacatgg

SEQ ID NO: 534 - DNA, 34 bp, synthetic construct
  misc_feature 1..34: note = Synthetic
  source 1..34: mol_type = other DNA
aacccactgcttaagcctcaataaagcttgcctt

SEQ ID NO: 535 - DNA, 34 bp, synthetic construct
  misc_feature 1..34: note = Synthetic
  source 1..34: mol_type = other DNA
gatacaacgtatatacctttctatacgttgttta

SEQ ID NO: 536 - DNA, 48 bp, synthetic construct
  misc_feature 1..48: note = Synthetic
  source 1..48: mol_type = other DNA
ggtttgtctggtcaaccaccgcggtctcagtggtgtacggtacaaacc

SEQ ID NO: 537 - DNA, 38 bp, synthetic construct
  misc_feature 1..38: note = Synthetic
  source 1..38: mol_type = other DNA
ggcttgtcgacgacggcggtctccgtcgtcaggatcat

SEQ ID NO: 538 - DNA, 42 bp, synthetic construct
  misc_feature 1..42: note = Synthetic
  source 1..42: mol_type = other DNA
gtgccccaactggggtaacctttgagttctctcagttggggg

SEQ ID NO: 539 - DNA, 45 bp, synthetic construct
  misc_feature 1..45: note = Synthetic
  source 1..45: mol_type = other DNA
tgcgggtgccagggcgtgcccttgggctccccgggcgcgtactcc

SEQ ID NO: 540 - DNA, 50 bp, synthetic construct
  misc_feature 1..50: note = Synthetic
  source 1..50: mol_type = other DNA
tgttccccaaagcgataccacttgaagcagtggtactgcttgtgggtaca

SEQ ID NO: 541 - DNA, 64 bp, synthetic construct
  misc_feature 1..64: note = Synthetic
  source 1..64: mol_type = other DNA
gcatgttccccaaagcgataccacttgaagcagtggtactgcttgtgggtacactctgcgggtg

SEQ ID NO: 542 - DNA, 52 bp, synthetic construct
  misc_feature 1..52: note = Synthetic
  source 1..52: mol_type = other DNA
ggtgctgggttgttgtctctggacagtgatccatgggaaactactcagcacc

SEQ ID NO: 543 - DNA, 34 bp, synthetic construct
  misc_feature 1..34: note = Synthetic
  source 1..34: mol_type = other DNA
caggtttttgacgaaagtgatccagatgatccag

SEQ ID NO: 544 - DNA, 54 bp, synthetic construct
  misc_feature 1..54: note = Synthetic
  source 1..54: mol_type = other DNA
attttaggtatatgattttgtttattagtgtaaataacactatgtacctaaaat

SEQ ID NO: 545 - DNA, 42 bp, synthetic construct
  misc_feature 1..42: note = Synthetic
  source 1..42: mol_type = other DNA
caaaggatcactgaatcaaaagtattgctcatccacgcgaaa

SEQ ID NO: 546 - DNA, 55 bp, synthetic construct
  misc_feature 1..55: note = Synthetic
  source 1..55: mol_type = other DNA
tttgtgcggaactacgaacagttcattaatacgaagtgtacaaacttccatacaa

SEQ ID NO: 547 - DNA, 56 bp, synthetic construct
  misc_feature 1..56: note = Synthetic
  source 1..56: mol_type = other DNA
cgaaaatgtatggaggcacttgtatcaatataggatgtataccttcgaagacactt

SEQ ID NO: 548 - DNA, 53 bp, synthetic construct
  misc_feature 1..53: note = Synthetic
  source 1..53: mol_type = other DNA
gagtttttatttcgtttatttcaattaaggtaactaaaaaactccttttaagg

SEQ ID NO: 549 - DNA, 53 bp, synthetic construct
  misc_feature 1..53: note = Synthetic
  source 1..53: mol_type = other DNA
atgccaacacaattaacatctcaatcaaggtaaatgctttttgctttttttgc

SEQ ID NO: 550 - DNA, 40 bp, synthetic construct
  misc_feature 1..40: note = Synthetic
  source 1..40: mol_type = other DNA
ttcctcgttttctctcgttggaagaagaagaaacgagaaa

SEQ ID NO: 551 - DNA, 40 bp, synthetic construct
  misc_feature 1..40: note = Synthetic
  source 1..40: mol_type = other DNA
tttcggatcaagctatgaaggacgcaaagagggaactaaa

SEQ ID NO: 552 - DNA, 40 bp, synthetic construct
  misc_feature 1..40: note = Synthetic
  source 1..40: mol_type = other DNA
ttcctcgttttctctcgttggacggaaacgaatcgagaaa

SEQ ID NO: 553 - DNA, 40 bp, synthetic construct; identical to SEQ ID NO: 551
  misc_feature 1..40: note = Synthetic
  source 1..40: mol_type = other DNA

SEQ ID NO: 554 - DNA, 52 bp, synthetic construct
  misc_feature 1..52: note = Synthetic
  source 1..52: mol_type = other DNA
gtagtgtatctcacaggtccacggttggccgtggactgctgaagaacattcc

SEQ ID NO: 555 - DNA, 40 bp, synthetic construct
  misc_feature 1..40: note = Synthetic
  source 1..40: mol_type = other DNA
gaaggtgttggtgcggggttggccgtggtcgaggtggggt

SEQ ID NO: 556 - DNA, 52 bp, synthetic construct
  misc_feature 1..52: note = Synthetic
  source 1..52: mol_type = other DNA
aaaaaaatacagcgtttttcatgtacaactatactagttgtagtgcctaaaa

SEQ ID NO: 557 - DNA, 54 bp, synthetic construct
  misc_feature 1..54: note = Synthetic
  source 1..54: mol_type = other DNA
ttgtaaaggagactgataatggcatgtacaactatactcgtcggtaaaaaggca

SEQ ID NO: 558 - DNA, 46 bp, synthetic construct
  misc_feature 1..46: note = Synthetic
  source 1..46: mol_type = other DNA
tccagcccaacagtgttagtctttgctcttacccagttgggcggga

SEQ ID NO: 559 - DNA, 47 bp, synthetic construct
  misc_feature 1..47: note = Synthetic
  source 1..47: mol_type = other DNA
gatcagctccgcgggcaagacctttctccttcacggggtggaaggtc

SEQ ID NO: 560 - DNA, 63 bp, synthetic construct
  misc_feature 1..63: note = Synthetic
  source 1..63: mol_type = other DNA
ctagttttaaagttggttattagttactgtgatatttatcacggtacccaataaccaatgaat

SEQ ID NO: 561 - DNA, 71 bp, synthetic construct
  misc_feature 1..71: note = Synthetic
  source 1..71: mol_type = other DNA
cggaaggtagcgtcaacgataggtgtaactgtcgtgtttgtaacggtacttccaacagctggcgccgccac

SEQ ID NO: 562 - DNA, 33 bp, synthetic construct
  misc_feature 1..33: note = Synthetic
  source 1..33: mol_type = other DNA
caatgaaaaactaggcatgtagaagttgtttgt

SEQ ID NO: 563 - DNA, 32 bp, synthetic construct
  misc_feature 1..32: note = Synthetic
  source 1..32: mol_type = other DNA
tttccacagacaactcacgtggaggtagtcac

SEQ ID NO: 564 - DNA, 56 bp, synthetic construct
  misc_feature 1..56: note = Synthetic
  source 1..56: mol_type = other DNA
tgtagtaagtatcttaatatacagctttatctgttttttaagatacttactacttt

SEQ ID NO: 565 - DNA, 58 bp, synthetic construct
  misc_feature 1..58: note = Synthetic
  source 1..58: mol_type = other DNA
cacccattgtgttcacaggagatacagctttatctgtactgatattaatgacatgctg

SEQ ID NO: 566 - DNA, 47 bp, synthetic construct
  misc_feature 1..47: note = Synthetic
  source 1..47: mol_type = other DNA
agttgtggccatgtgtccatctgggggcagatggagacggggtcaca

SEQ ID NO: 567 - DNA, 50 bp, synthetic construct
  misc_feature 1..50: note = Synthetic
  source 1..50: mol_type = other DNA
atctggatgtgggtgtccatctgcgggcagacgccgcagtcgaagcacgg

SEQ ID NO: 568 - DNA, 50 bp, synthetic construct
  misc_feature 1..50: note = Synthetic
  source 1..50: mol_type = other DNA
accttgatctcggtgtccatcgccgggcagacgccgcagtcgaagcacgg

SEQ ID NO: 569 - DNA, 60 bp, synthetic construct
  misc_feature 1..60: note = Synthetic
  source 1..60: mol_type = other DNA
ccctaatacgcaagtcgataactctcctgggagcgttgacaacttgcgcaccctgatctg

SEQ ID NO: 570 - DNA, 61 bp, synthetic construct
  misc_feature 1..61: note = Synthetic
  source 1..61: mol_type = other DNA
gagcgccggatcagggagtggacggcctgggagcgctacacgctgtggctgcggtcggtgc

SEQ ID NO: 571 - DNA, 63 bp, synthetic construct
  misc_feature 1..63: note = Synthetic
  source 1..63: mol_type = other DNA
gctcatgtatgtgtctacgcgagattctcgcccgagaacttctgcaaggcactgctcttggct

SEQ ID NO: 572 - DNA, 59 bp, synthetic construct
  misc_feature 1..59: note = Synthetic
  source 1..59: mol_type = other DNA
ggacggcgcagaaggggagtagctcttcgccggaccgtcgacatactgctcagctcgtc

SEQ ID NO: 573 - DNA, 65 bp, synthetic construct
  misc_feature 1..65: note = Synthetic
  source 1..65: mol_type = other DNA
atggataaaaaaatacagcgtttttcatgtacaactatactagttgtagtgcctaaataatgctt

SEQ ID NO: 574 - DNA, 62 bp, synthetic construct
  misc_feature 1..62: note = Synthetic
  source 1..62: mol_type = other DNA
gtttgtaaaggagactgataatggcatgtacaactatactcgtcggtaaaaaggcatcttat

SEQ ID NO: 575 - DNA, 62 bp, synthetic construct
  misc_feature 1..62: note = Synthetic
  source 1..62: mol_type = other DNA
aaaaattacaaagttttcaacccttgatttgaattagcggtcaaataatttgtaattcgttt

SEQ ID NO: 576 - DNA, 66 bp, synthetic construct
  misc_feature 1..66: note = Synthetic
  source 1..66: mol_type = other DNA
ttccaaagagcgcccaacgcgacctgaaatttgaataagactgctgcttgtgtaaaggcgatgatt

SEQ ID NO: 577 - DNA, 66 bp, synthetic construct
  misc_feature 1..66: note = Synthetic
  source 1..66: mol_type = other DNA
gtgttataaacctgtgtgagagttaagtttacatgcctaaccttaacttttacgcaggttcagctt

SEQ ID NO: 578 - DNA, 62 bp, synthetic construct
  misc_feature 1..62: note = Synthetic
  source 1..62: mol_type = other DNA
agacgagaaacgttccgtccgtctgggtcagttgggcaaagttgatgaccgggtcgtccgtt

SEQ ID NO: 579 - DNA, 64 bp, synthetic construct
  misc_feature 1..64: note = Synthetic
  source 1..64: mol_type = other DNA
ttaataaactatggaagtatgtacagtcttgcaatgttgagtgaacaaacttccataataaaat

SEQ ID NO: 580 - DNA, 65 bp, synthetic construct
  misc_feature 1..65: note = Synthetic
  source 1..65: mol_type = other DNA
caatcatcagataactatggcggcacgtgcattaaccacggttgtatcccgtctaaagtactcgt

SEQ ID NO: 581 - DNA, 62 bp, synthetic construct
  misc_feature 1..62: note = Synthetic
  source 1..62: mol_type = other DNA
gtggttgtttttgttggaagtgtgtatcaggtatctgcatagttattccgaacttccaatta

SEQ ID NO: 582 - DNA, 65 bp, synthetic construct
  misc_feature 1..65: note = Synthetic
  source 1..65: mol_type = other DNA
tttatattgcgaaaaataattggcgaacgaggtaactggatacctcatccgccaattaaaatttg

SEQ ID NO: 583 - DNA, 62 bp, synthetic construct
  misc_feature 1..62: note = Synthetic
  source 1..62: mol_type = other DNA
ggaaaatataaataattttagtaacctacatctcaatcaaggatagtaaaactctcactctt

SEQ ID NO: 584 - DNA, 62 bp, synthetic construct
  misc_feature 1..62: note = Synthetic
  source 1..62: mol_type = other DNA
agcacgctgataatcagcaagaccaccaacatttccaccaatgtaaaagctttaaccttagc

SEQ ID NO: 585 - DNA, 65 bp, synthetic construct
  misc_feature 1..65: note = Synthetic
  source 1..65: mol_type = other DNA
gtttatatgtttactaataagacgctctcaacccataaagtcttattagtaaacatatttcaact

SEQ ID NO: 586 - DNA, 65 bp, synthetic construct
  misc_feature 1..65: note = Synthetic
  source 1..65: mol_type = other DNA
atggattttgcagattcccagatgcccctacagaaagaggtacaaaacatttattggaattaatt

SEQ ID NO: 587 - DNA, 65 bp, synthetic construct
  misc_feature 1..65: note = Synthetic
  source 1..65: mol_type = other DNA
tttttgtatgttagttgtgtcactgggtagacctaaatagtgacacaactgctattaaaatttaa

SEQ ID NO: 588 - DNA, 66 bp, synthetic construct
  misc_feature 1..66: note = Synthetic
  source 1..66: mol_type = other DNA
gttcgtggtaactatgggtggtacaggtgccacattagttgtaccatttatgtttatgtggttaac

SEQ ID NO: 589 - DNA, 64 bp, synthetic construct
  misc_feature 1..64: note = Synthetic
  source 1..64: mol_type = other DNA
caataacggttgtatttgtagaacttgaccagttgttttagtaacataaatacaactccgaata

SEQ ID NO: 590 - DNA, 64 bp, synthetic construct
  misc_feature 1..64: note = Synthetic
  source 1..64: mol_type = other DNA
gcatacattgttgttgtttttccagatccagttggtcctgtaaatataagcaatccatgtgagt

SEQ ID NO: 591 - DNA, 52 bp, synthetic construct
  misc_feature 1..52: note = Synthetic
  source 1..52: mol_type = other DNA
gtttagtatctcgttatctctcgttggagggagaagaaacgggataccaaaa

SEQ ID NO: 592 - DNA, 52 bp, synthetic construct
  misc_feature 1..52: note = Synthetic
  source 1..52: mol_type = other DNA
taactttttcggatcgagttatgatggacgtaaagagggaacaaagcatcta

SEQ ID NO: 593 - DNA, 52 bp, synthetic construct
  misc_feature 1..52: note = Synthetic
  source 1..52: mol_type = other DNA
tagtttccaatgttacaggaactgctggcagaatccaacacattggaagtcg

SEQ ID NO: 594 - DNA, 42 bp, synthetic construct
  misc_feature 1..42: note = Synthetic
  source 1..42: mol_type = other DNA
cggtctccatcgggatctgctgatcgagcagcatgccgacca

SEQ ID NO: 595 - DNA, 52 bp, synthetic construct
  misc_feature 1..52: note = Synthetic
  source 1..52: mol_type = other DNA
taaccgcaagtgtacatccctcggctggccgagacaagtacagttgcgacag

SEQ ID NO: 596 - DNA, 42 bp, synthetic construct; identical to SEQ ID NO: 594
  misc_feature 1..42: note = Synthetic
  source 1..42: mol_type = other DNA

SEQ ID NO: 597 - DNA, 52 bp, synthetic construct
  misc_feature 1..52: note = Synthetic
  source 1..52: mol_type = other DNA
atgtggtcctttagatccactgacgtgggtcagtgtctctaaaggactcgcg

SEQ ID NO: 598 - DNA, 53 bp, synthetic construct
  misc_feature 1..53: note = Synthetic
  source 1..53: mol_type = other DNA
catcagggcggtcaggccgtagatgtggaagaaacggcagcacggcgaggacg

SEQ ID NO: 599 - DNA, 32 bp, synthetic construct
  misc_feature 1..32: note = Synthetic
  source 1..32: mol_type = other DNA
cgtttcctgtaaaccgaggttttggataaaca

SEQ ID NO: 600 - DNA, 32 bp, synthetic construct
  misc_feature 1..32: note = Synthetic
  source 1..32: mol_type = other DNA
cgtttcctgtaaaccgaggttttggataatgg

SEQ ID NO: 601 - DNA, 32 bp, synthetic construct
  misc_feature 1..32: note = Synthetic
  source 1..32: mol_type = other DNA
gagttctcttaaaccaaggtttaggattgaaa

SEQ ID NO: 602 - DNA, 32 bp, synthetic construct
  misc_feature 1..32: note = Synthetic
  source 1..32: mol_type = other DNA
gagttctcttaaaccaaggtattggataacag

SEQ ID NO: 603 - DNA, 32 bp, synthetic construct
  misc_feature 1..32: note = Synthetic
  source 1..32: mol_type = other DNA
tggttcttgaaaaccaaggtttttgataaagc

SEQ ID NO: 604 - DNA, 33 bp, synthetic construct
  misc_feature 1..33: note = Synthetic
  source 1..33: mol_type = other DNA
aaattttcctttttggaaggtttttgataacca

SEQ ID NO: 605 - DNA, 32 bp, synthetic construct
  misc_feature 1..32: note = Synthetic
  source 1..32: mol_type = other DNA
gccttcccctaaaccaacgtttttatgccgcc

SEQ ID NO: 606 - DNA, 32 bp, synthetic construct
  misc_feature 1..32: note = Synthetic
  source 1..32: mol_type = other DNA
gccttcccccaaaccaaggtaatcaagaacgc

SEQ ID NO: 607 - DNA, 32 bp, synthetic construct
  misc_feature 1..32: note = Synthetic
  source 1..32: mol_type = other DNA
ttgtgaaatttgggtacaccctaatcatacaa

SEQ ID NO: 608 - DNA, 26 bp, synthetic construct
  misc_feature 1..26: note = Synthetic
  source 1..26: mol_type = other DNA
cgtatgattagggtgtatattaattt

SEQ ID NO: 609 - DNA, 101 bp, synthetic construct
  misc_feature 1..101: note = Synthetic
  source 1..101: mol_type = other DNA
caaatgattttattttgactaataatgacctacttacattaatttactgataattaaagagattttaaatatacaacttattcacctaaaggatgacaaaa

SEQ ID NO: 610 - DNA, 21 bp, synthetic construct
  misc_feature 1..21: note = Synthetic
  source 1..21: mol_type = other DNA
gcactttaggtgaaaaaggtt

SEQ ID NO: 611 - DNA, 126 bp, synthetic construct
  misc_feature 1..126: note = Synthetic
  source 1..126: mol_type = other DNA
taacattaatcacttaaaaatcatcgcattacactaatctgtggttaaatgatagactacataatgcgacaaaacgcaacatatccagtcactatgaatcaactacttagatagtattagtgacct

SEQ ID NO: 612 - DNA, 259 bp, synthetic construct
  misc_feature 1..259: note = Synthetic
  source 1..259: mol_type = other DNA
ctaagtggtttgggacaaaaatgggacatacaaatctttgcatcggtttgcaaggctttgcatgtctttcgaagatgggacgtgtgagcgcaggtatgacgtggtatgtgttgacttaaaaggtagttcttataattcgtaatgcgaaggtcgtaggttcgactcctattatcggcaccagttaaatcaaatacttacgtattattcgtgccttccttatttttactgtgggacatatttgggacagaagtaccaaaaa

SEQ ID NO: 613 - DNA, 27 bp, synthetic construct
  misc_feature 1..27: note = Synthetic
  source 1..27: mol_type = other DNA
gcagcgcattcgtaatgcgaaggtcgt

SEQ ID NO: 614 - DNA, 412 bp, synthetic construct
  misc_feature 1..412: note = Synthetic
  source 1..412: mol_type = other DNA
gcgatccccatccgcgacgtgccaactaggtctcctctcgtcgtgaacaaggctaccgggttgcaactcctgtgcaactctcaggcttcaacgcgcttctacgacctgcaatttctttccacttagaggatgcagccgagaggggtaaaaacctatcttgaccggcccatatgtggtcggcagacacccattcttccaaactagctacgcgggttcgattcccgtcgcccgctccgctggtcagagggtgttttcgccctctggccatttttctttccaggggtctgcaactcttgtgcgactcttctgacctgggcatacgcggttgcaacgcatccctgatctggctactttcgatgctgacaaacgaatagagccccccgcctgcgcgaacagacgaggggcattcaca

SEQ ID NO: 615 - DNA, 43 bp, synthetic construct
  misc_feature 1..43: note = Synthetic
  source 1..43: mol_type = other DNA
gagcgggcgacgggaatcgaacccgcgtagctagtttggaaga

SEQ ID NO: 616 - DNA, 20 bp, synthetic construct
  misc_feature 1..20: note = Synthetic
  source 1..20: mol_type = other DNA
gtcaaccagtatcccggtgc

SEQ ID NO: 617 - DNA, 20 bp, synthetic construct
  misc_feature 1..20: note = Synthetic
  source 1..20: mol_type = other DNA
ggggtcccaggtgctgacgt

SEQ ID NO: 618 - DNA, 21 bp, synthetic construct
  misc_feature 1..21: note = Synthetic
  source 1..21: mol_type = other DNA
gatgtacagagagcccagggc

SEQ ID NO: 619 - DNA, 20 bp, synthetic construct
  misc_feature 1..20: note = Synthetic
  source 1..20: mol_type = other DNA
gtcaaccagtatcccggtgc

SEQ ID NO: 620 - DNA, 21 bp, synthetic construct
  misc_feature 1..21: note = Synthetic
  source 1..21: mol_type = other DNA
gatgtacagagagcccagggc

SEQ ID NO: 621 - DNA, 20 bp, synthetic construct
  misc_feature 1..20: note = Synthetic
  source 1..20: mol_type = other DNA
ggggtcccaggtgctgacgt

SEQ ID NO: 622 - protein, 4 aa, synthetic construct
  REGION 1..4: note = Synthetic
FCPF

SEQ ID NO: 623-624 - skipped (2 entries)

SEQ ID NO: 625 - DNA, 209 bp, synthetic construct
  misc_feature 1..209: note = Synthetic
  source 1..209: mol_type = other DNA
ttcattcagcaagttcagagaaatctgaacttgctggatttttggagcagggagatggaataggagcttgctccgtccactccacgcatcgacctggtattgcagtacctccaggaacggtgcacccactttctggagtttcaaaagtagactgtacgctaagggtcatatctttttttgtttggtttgtgtcttggttggcgtcttaa

SEQ ID NO: 626 - DNA, 21 bp, synthetic construct
  misc_feature 1..21: note = Synthetic
  source 1..21: mol_type = other DNA
gccttgataccaacctgccca

SEQ ID NO: 627 - DNA, 21 bp, synthetic construct
  misc_feature 1..21: note = Synthetic
  source 1..21: mol_type = other DNA
gctggaactggtcaccaaggc

SEQ ID NO: 628 - DNA, 21 bp, synthetic construct
  misc_feature 1..21: note = Synthetic
  source 1..21: mol_type = other DNA
gtacctgaaccgtatatccta

SEQ ID NO: 629 - DNA, 21 bp, synthetic construct
  misc_feature 1..21: note = Synthetic
  source 1..21: mol_type = other DNA
gtacctgaaccgtatatctta

SEQ ID NO: 630 - protein, 535 aa, synthetic construct; identical to SEQ ID NO: 398
  REGION 1..535: note = Synthetic

SEQ ID NO: 631 - skipped

SEQ ID NO: 632 - DNA, 20 bp, synthetic construct
  misc_feature 1..20: note = Synthetic
  source 1..20: mol_type = other DNA
ggcccagactgagcacgtga

SEQ ID NO: 633 - DNA, 20 bp, synthetic construct
  misc_feature 1..20: note = Synthetic
  source 1..20: mol_type = other DNA
ggcccagactgagcacgtga

SEQ ID NO: 634 - DNA, 20 bp, synthetic construct
  misc_feature 1..20: note = Synthetic
  source 1..20: mol_type = other DNA
ggcccagactgagcacgtga

SEQ ID NO: 635 - DNA, 20 bp, synthetic construct
  misc_feature 1..20: note = Synthetic
  source 1..20: mol_type = other DNA
ggcccagactgagcacgtga

SEQ ID NO: 636 - DNA, 20 bp, synthetic construct
  misc_feature 1..20: note = Synthetic
  source 1..20: mol_type = other DNA
ggcccagactgagcacgtga

SEQ ID NO: 637 - DNA, 20 bp, synthetic construct
  misc_feature 1..20: note = Synthetic
  source 1..20: mol_type = other DNA
gtcatcttagtcattacctg

SEQ ID NO: 638 - DNA, 20 bp, synthetic construct
  misc_feature 1..20: note = Synthetic
  source 1..20: mol_type = other DNA
gtcatcttagtcattacctg

SEQ ID NO: 639 - DNA, 20 bp, synthetic construct
  misc_feature 1..20: note = Synthetic
  source 1..20: mol_type = other DNA
gtcatcttagtcattacctg

SEQ ID NO: 640 - DNA, 21 bp, synthetic construct
  misc_feature 1..21: note = Synthetic
  source 1..21: mol_type = other DNA
gcatggtgcacctgactcctg

SEQ ID NO: 641 - DNA, 23 bp, synthetic construct
  misc_feature 1..23: note = Synthetic
  source 1..23: mol_type = other DNA
tctgccatcccgtgctcagtctg

SEQ ID NO: 642 - DNA, 23 bp, synthetic construct
  misc_feature 1..23: note = Synthetic
  source 1..23: mol_type = other DNA
tctgccagcacgtgctcagtctg

SEQ ID NO: 643 - DNA, 23 bp, synthetic construct
  misc_feature 1..23: note = Synthetic
  source 1..23: mol_type = other DNA
tctgccaacacgtgctcagtctg

SEQ ID NO: 644 - DNA, 47 bp, synthetic construct
  misc_feature 1..47: note = Synthetic
  source 1..47: mol_type = other DNA
tggaggaagcagggcttcctttcctctgaaaacacgtgctcagtctg

SEQ ID NO: 645 - DNA, 26 bp, synthetic construct
  misc_feature 1..26: note = Synthetic
  source 1..26: mol_type = other DNA
tctgccatcaaagcgtgctcagtctg

SEQ ID NO: 646 - DNA, 29 bp, synthetic construct
  misc_feature 1..29: note = Synthetic
  source 1..29: mol_type = other DNA
aacgaacacctcatgtaatgactaagatg

SEQ ID NO: 647 - DNA, 29 bp, synthetic construct
  misc_feature 1..29: note = Synthetic
  source 1..29: mol_type = other DNA
aacgaacacctcacgtaatgactaagatg

SEQ ID NO: 648 - DNA, 32 bp, synthetic construct
  misc_feature 1..32: note = Synthetic
  source 1..32: mol_type = other DNA
aacgaacacctcagtacgtaatgactaagatg

SEQ ID NO: 649 - DNA, 27 bp, synthetic construct
  misc_feature 1..27: note = Synthetic
  source 1..27: mol_type = other DNA
agacttctccacaggagtcaggtgcac

SEQ ID NO: 650-662 - skipped (13 entries)

SEQ ID NO: 663 - DNA, 20 bp, synthetic construct
  misc_feature 1..20: note = Synthetic
  source 1..20: mol_type = other DNA
ggcccagactgagcacgtga

SEQ ID NO: 664 - DNA, 20 bp, synthetic construct
  misc_feature 1..20: note = Synthetic
  source 1..20: mol_type = other DNA
ggcccagactgagcacgtga

SEQ ID NO: 665 - DNA, 20 bp, synthetic construct
  misc_feature 1..20: note = Synthetic
  source 1..20: mol_type = other DNA
ggcccagactgagcacgtga

SEQ ID NO: 666 - DNA, 20 bp, synthetic construct
  misc_feature 1..20: note = Synthetic
  source 1..20: mol_type = other DNA
ggcccagactgagcacgtga

SEQ ID NO: 667 - DNA, 20 bp, synthetic construct
  misc_feature 1..20: note = Synthetic
  source 1..20: mol_type = other DNA
ggcactgcggctggaggtgg

SEQ ID NO: 668 - DNA, 20 bp, synthetic construct
  misc_feature 1..20: note = Synthetic
  source 1..20: mol_type = other DNA
ggcactgcggctggaggtgg

SEQ ID NO: 669 - DNA, 20 bp, synthetic construct
  misc_feature 1..20: note = Synthetic
  source 1..20: mol_type = other DNA
ggcactgcggctggaggtgg

SEQ ID NO: 670 - DNA, 20 bp, synthetic construct
  misc_feature 1..20: note = Synthetic
  source 1..20: mol_type = other DNA
ggcactgcggctggaggtgg

SEQ ID NO: 671 - DNA, 20 bp, synthetic construct
  misc_feature 1..20: note = Synthetic
  source 1..20: mol_type = other DNA
gagtccgagcagaagaagaa

SEQ ID NO: 672 - DNA, 20 bp, synthetic construct
  misc_feature 1..20: note = Synthetic
  source 1..20: mol_type = other DNA
gagtccgagcagaagaagaa

SEQ ID NO: 673 - DNA, 20 bp, synthetic construct
  misc_feature 1..20: note = Synthetic
  source 1..20: mol_type = other DNA
gagtccgagcagaagaagaa

SEQ ID NO: 674 - DNA, 20 bp, synthetic construct
  misc_feature 1..20: note = Synthetic
  source 1..20: mol_type = other DNA
gagtccgagcagaagaagaa

SEQ ID NO: 675 - DNA, 20 bp, synthetic construct
  misc_feature 1..20: note = Synthetic
  source 1..20: mol_type = other DNA
ggaatcccttctgcagcacc

SEQ ID NO: 676 - DNA, 20 bp, synthetic construct
  misc_feature 1..20: note = Synthetic
  source 1..20: mol_type = other DNA
ggaatcccttctgcagcacc

SEQ ID NO: 677 - DNA, 20 bp, synthetic construct
  misc_feature 1..20: note = Synthetic
  source 1..20: mol_type = other DNA
ggaatcccttctgcagcacc

SEQ ID NO: 678 - DNA, 23 bp, synthetic construct
  misc_feature 1..23: note = Synthetic
  source 1..23: mol_type = other DNA
tctgccatctcgtgctcagtctg

SEQ ID NO: 679 - DNA, 26 bp, synthetic construct
  misc_feature 1..26: note = Synthetic
  source 1..26: mol_type = other DNA
tctgccatcaaagcgtgctcagtctg

SEQ ID NO: 680 - DNA, 22 bp, synthetic construct
  misc_feature 1..22: note = Synthetic
  source 1..22: mol_type = other DNA
tctgccatccgtgctcagtctg

SEQ ID NO: 681 - DNA, 23 bp, synthetic construct
  misc_feature 1..23: note = Synthetic
  source 1..23: mol_type = other DNA
tctgcgatcacgtgctcagtctg

SEQ ID NO: 682 - DNA, 19 bp, synthetic construct
  misc_feature 1..19: note = Synthetic
  source 1..19: mol_type = other DNA
ttaacgcccacctccagcc

SEQ ID NO: 683 - DNA, 19 bp, synthetic construct
  misc_feature 1..19: note = Synthetic
  source 1..19: mol_type = other DNA
ttaacccccccctccagcc

SEQ ID NO: 684 - DNA, 22 bp, synthetic construct
  misc_feature 1..22: note = Synthetic
  source 1..22: mol_type = other DNA
ttaaccccttacacctccagcc

SEQ ID NO: 685 - DNA, 18 bp, synthetic construct
  misc_feature 1..18: note = Synthetic
  source 1..18: mol_type = other DNA
ttaaccccccctccagcc

SEQ ID NO: 686 - DNA, 30 bp, synthetic construct
  misc_feature 1..30: note = Synthetic
  source 1..30: mol_type = other DNA
gtgatgggagcacttcttcttctgctcgga

SEQ ID NO: 687 - DNA, 30 bp, synthetic construct
  misc_feature 1..30: note = Synthetic
  source 1..30: mol_type = other DNA
gtgatgggagccctgcttcttctgctcgga

SEQ ID NO: 688 - DNA, 33 bp, synthetic construct
  misc_feature 1..33: note = Synthetic
  source 1..33: mol_type = other DNA
gtgatgggagcccttcgcattcttctgctcgga

SEQ ID NO: 689 - DNA, 27 bp, synthetic construct
  misc_feature 1..27: note = Synthetic
  source 1..27: mol_type = other DNA
gtgatgggagttcttcttctgctcgga

SEQ ID NO: 690 - DNA, 31 bp, synthetic construct
  misc_feature 1..31: note = Synthetic
  source 1..31: mol_type = other DNA
ggaaaagcgatgcaggtgctgcagaagggat

SEQ ID NO: 691 - DNA, 31 bp, synthetic construct
  misc_feature 1..31: note = Synthetic
  source 1..31: mol_type = other DNA
ggaaaagcgatccaggcgctgcagaagggat

SEQ ID NO: 692 - DNA, 34 bp, synthetic construct
  misc_feature 1..34: note = Synthetic
  source 1..34: mol_type = other DNA
ggaaaagcgatccaatcggtgctgcagaagggat

SEQ ID NO: 693-699 - skipped (7 entries)

SEQ ID NO: 700 - protein, 677 aa, unidentified; identical to SEQ ID NO: 89
  REGION 1..677: note = moloney murine leukemia virus

SEQ ID NO: 701 - protein, 677 aa, synthetic construct; identical to SEQ ID NO: 106
  REGION 1..677: note = Synthetic

SEQ ID NO: 702 - protein, 677 aa, synthetic construct; identical to SEQ ID NO: 107
  REGION 1..677: note = Synthetic

SEQ ID NO: 703 - protein, 677 aa, synthetic construct; identical to SEQ ID NO: 109
  REGION 1..677: note = Synthetic

SEQ ID NO: 704 - protein, 677 aa, synthetic construct; identical to SEQ ID NO: 110
  REGION 1..677: note = Synthetic

SEQ ID NO: 705 - protein, 677 aa, synthetic construct; identical to SEQ ID NO: 111
  REGION 1..677: note = Synthetic

SEQ ID NO: 706 - protein, 677 aa, synthetic construct; identical to SEQ ID NO: 112
  REGION 1..677: note = Synthetic

SEQ ID NO: 707 - protein, 677 aa, synthetic construct; identical to SEQ ID NO: 113
  REGION 1..677: note = Synthetic

SEQ ID NO: 708 - protein, 677 aa, synthetic construct; identical to SEQ ID NO: 114
  REGION 1..677: note = Synthetic

SEQ ID NO: 709 - protein, 677 aa, synthetic construct; identical to SEQ ID NO: 115
  REGION 1..677: note = Synthetic

SEQ ID NO: 710 - protein, 677 aa, synthetic construct; identical to SEQ ID NO: 116
  REGION 1..677: note = Synthetic

SEQ ID NO: 711 - protein, 677 aa, synthetic construct; identical to SEQ ID NO: 117
  REGION 1..677: note = Synthetic

SEQ ID NO: 712 - protein, 677 aa, synthetic construct; identical to SEQ ID NO: 118
  REGION 1..677: note = Synthetic

SEQ ID NO: 713 - protein, 677 aa, synthetic construct; identical to SEQ ID NO: 119
  REGION 1..677: note = Synthetic

SEQ ID NO: 714 - protein, 677 aa, synthetic construct; identical to SEQ ID NO: 120
  REGION 1..677: note = Synthetic

SEQ ID NO: 715 - protein, 677 aa, synthetic construct; identical to SEQ ID NO: 121
  REGION 1..677: note = Synthetic

SEQ ID NO: 716 - protein, 677 aa, synthetic construct; identical to SEQ ID NO: 122
  REGION 1..677: note = Synthetic

SEQ ID NO: 717 - DNA, 100 bp, synthetic construct
  misc_feature 1..100: note = Synthetic
  source 1..100: mol_type = other DNA
gcttctccagccctggcctgggtcaatccttggggcccagactgagcacgtgttggcagaggaaaggaagccctgcttcctccagagggcgtcgcaggac

SEQ ID NO: 718 - DNA, 100 bp, synthetic construct
  misc_feature 1..100: note = Synthetic
  source 1..100: mol_type = other DNA
gcttctccagccctggcctgggtcaatccttggggcccagactgagcacgtgttttcagaggaaaggaagccctgcttcctccagagggcgtcgcaggac

SEQ ID NO: 719 - DNA, 100 bp, synthetic construct
  misc_feature 1..100: note = Synthetic
  source 1..100: mol_type = other DNA
gcttctccagccctggcctgggtcaatccttggggcccagactgagcacgggatggcagaggaaaggaagccctgcttcctccagagggcgtcgcaggac

SEQ ID NO: 720 - DNA, 100 bp, synthetic construct
  misc_feature 1..100: note = Synthetic
  source 1..100: mol_type = other DNA
gcttctccagccctggcctgggtcaatccttggggcccagactgagcacgtgctggcagaggaaaggaagccctgcttcctccagagggcgtcgcaggac

SEQ ID NO: 721 - DNA, 103 bp, synthetic construct
  misc_feature 1..103: note = Synthetic
  source 1..103: mol_type = other DNA
gcttctccagccctggcctgggtcaatccttggggcccagactgagcacgctttgatggcagaggaaaggaagccctgcttcctccagagggcgtcgcaggac

SEQ ID NO: 722 - DNA, 100 bp, synthetic construct
  misc_feature 1..100: note = Synthetic
  source 1..100: mol_type = other DNA
cccagtttacacgtctcatatgccccttggcagtcatcttagtcattacatgaggtgttcgttgtaactcatataaactgagttcccatgttttgcttaa

SEQ ID NO: 723 - DNA, 100 bp, synthetic construct
  misc_feature 1..100: note = Synthetic
  source 1..100: mol_type = other DNA
cccagtttacacgtctcatatgccccttggcagtcatcttagtcattacgtgaggtgttcgttgtaactcatataaactgagttcccatgttttgcttaa

SEQ ID NO: 724 - DNA, 100 bp, synthetic construct
  misc_feature 1..100: note = Synthetic
  source 1..100: mol_type = other DNA
cagtttacacgtctcatatgccccttggcagtcatcttagtcattacgtactgaggtgttcgttgtaactcatataaactgagttcccatgttttgctta

SEQ ID NO: 725 - DNA, 100 bp, synthetic construct
  misc_feature 1..100: note = Synthetic
  source 1..100: mol_type = other DNA
acttcatccacgttcaccttgccccacagggcagtaacggcagacttctccacaggagtcagatgcaccatggtgtctgtttgaggttgctagtgaacac

SEQ ID NO: 726 - DNA, 100 bp, synthetic construct
  misc_feature 1..100: note = Synthetic
  source 1..100: mol_type = other DNA
acttcatccacgttcaccttgccccacagggcagtaacggcagacttctcctcaggagtcaggtgcaccatggtgtctgtttgaggttgctagtgaacac

SEQ ID NO: 727 - DNA, 100 bp, synthetic construct
  misc_feature 1..100: note = Synthetic
  source 1..100: mol_type = other DNA
gtgttcactagcaacctcaaacagacaccatggtgcacctgactcctgaggagaagtctgccgttactgccctgtggggcaaggtgaacgtggatgaagt

SEQ ID NO: 728 - DNA, 100 bp, synthetic construct
  misc_feature 1..100: note = Synthetic
  source 1..100: mol_type = other DNA
gtgttcactagcaacctcaaacagacaccatggtgcacctgactcctgatgagaagtctgccgttactgccctgtggggcaaggtgaacgtggatgaagt

SEQ ID NO: 729 - DNA, 100 bp, synthetic construct
  misc_feature 1..100: note = Synthetic
  source 1..100: mol_type = other DNA
cacatggctggtgctgcagcagctggggcagtggtggggggccttggcgtctacatgctgggaagtgccatgagcaggcccatcatacatttcggcagtg

SEQ ID NO: 730 - DNA, 9224 bp, synthetic construct
  misc_feature 1..9224: note = Synthetic
  source 1..9224: mol_type = other DNA
atgtctaaaggtgaagaattattcactggtgttgtcccaattttggttgaattagatggtgatgttaatggtcacaaattttctgtctccggtgaaggtgaaggtgatgctacttacggtaaattgaccttaaaatttatttgtactactggtaaattgccagttccatggccaaccttagtcactactttcggttatggtgttcaatgttttgctagatacccagatcatatgaaacaacatgactttttcaagtctgccatgccagaaggttatgttcaagaaagaactatttttttcaaagatgacggtaactacaagaccagagctgaagtcaagtttgaaggtgataccttagttaatagaatcgaattaaaaggtattgattttaaagaagatggtaacattttaggtcacaaattggaatacaactataactctcacaatgtttacatcatggctgacaaacaaaagaatggtatcaaagttaacttcaaaattagacacaacattgaagatggttctgttcaattagctgaccattatcaacaaaatactccaattggtgatggtccagtcttgttaccagacaaccattacttatccactcaatctgccttatccaaagatccaaacgaaaagagagaccacatggtcttgttagaatttgttactgctgctggtattacccatggtatggatgaattgtacaaagctagcaacctgggtcaatccttggggcccagactgagcacgtgatggcagagcacaggagacgtcatggtttcaaaaggtgaagaagataatatggctattattaaagaatttatgagatttaaagttcatatggaaggttcagttaatggtcatgaatttgaaattgaaggtgaaggtgaaggtagaccatatgaaggtactcaaactgctaaattgaaagttactaaaggtggtccattaccatttgcttgggatattttgtcaccacaatttatgtatggttcaaaagcttatgttaaacatccagctgatattccagattatttaaaattgtcatttccagaaggttttaaatgggaaagagttatgaattttgaagatggtggtgttgttactgttactcaagattcatcattacaagatggtgaatttatttataaagttaaattgagaggtactaattttccatcagatggtccagttatgcaaaaaaaaactatgggttgggaagcttcatcagaaagaatgtatccagaagatggtgctttaaaaggtgaaattaaacaaagattgaaattaaaagatggtggtcattatgatgctgaagttaaaactacttataaagctaaaaaaccagttcaattaccaggtgcttataatgttaatattaaattggatattacttcacataatgaagattatactattgttgaacaatatgaaagagctgaaggtagacattcaactggtggtatggatgaattatataaaggtaccgctcgagcagctgtgattgattgagtcgacttggttgaacacgttgccaaggcttaagtgaatttactttaaatcttgcatttaaataaattttctttttatagctttatgacttagtttcaatttatatactattttaatgacattttcgattcggatccactagttctagagcggccgccaccgcggtggagctccagcttttgttccctttagtgagggttaattgcgcgcttggcgtaatcatggtcatagctgtttcctgtgtgaaattgttatccgctcacaattccacacaacataggagccggaagcataaagtgtaaagcctggggtgcctaatgagtgaggtaactcacattaattgcgttgcgctcactgcccgctttccagtcgggaaacctgtcgtgccagctgcattaatgaatcggccaacgcgcggggagaggcggtttgcgtattgggcgctcttccgcttcctcgctcactgactcgctgcgctcggtcgttcggctgcggcgagcggtatcagctcactcaaaggcggtaatacggttatccacagaatcaggggataacgcaggaaagaacatgtgagcaaaaggccagcaaaaggccaggaaccgtaaaaaggccgcgttgctggcgtttttccataggctccgcccccctgacgagcatcacaaaaatcgacgctcaagtcagaggtggcgaaacccgacaggactataaagataccaggcgtttccccctggaagctccctcgtgcgctctcctgttccgaccctgccgcttaccggatacctgtccgcctttctcccttcgggaagcgtggcgctttctcatagctcacgctgtaggtatctcagttcggtgtaggtcgttcgctccaagctgggctgtgtgcacgaaccccccgttcagcccgaccgctgcgccttatccggtaactatcgtcttgagtccaacccggtaagacacgacttatcgccactggcagcagccactggtaacaggattagcagagcgaggtatgtaggcggtgctacagagttcttgaagtggtggcctaactacggctacactagaaggacagtatttggtatctgcgctctgctgaagccagttaccttcggaaaaagagttggtagctcttgatccggcaaacaaaccaccgctggtagcggtggtttttttgtttgcaagcagcagattacgcgcagaaaaaaaggatctcaagaagatcctttgatcttttctacggggtctgacgctcagtggaacgaaaactcacgttaagggattttggtcatgagattatcaaaaaggatcttcacctagatccttttaaattaaaaatgaagttttaaatcaatctaaagtatatatgagtaaacttggtctgacagttaccaatgcttaatcagtgaggcacctatctcagcgatctgtctatttcgttcatccatagttgcctgactccccgtcgtgtagataactacgatacgggagggcttaccatctggccccagtgctgcaatgataccgcgagacccacgctcaccggctccagatttatcagcaataaaccagccagccggaagggccgagcgcagaagtggtcctgcaactttatccgcctccatccagtctattaattgttgccgggaagctagagtaagtagttcgccagttaatagtttgcgcaacgttgttgccattgctacaggcatcgtggtgtcacgctcgtcgtttggtatggcttcattcagctccggttcccaacgatcaaggcgagttacatgatcccccatgttgtgcaaaaaagcggttagctccttcggtcctccgatcgttgtcagaagtaagttggccgcagtgttatcactcatggttatggcagcactgcataattctcttactgtcatgccatccgtaagatgcttttctgtgactggtgagtactcaaccaagtcattctgagaatagtgtatgcggcgaccgagttgctcttgcccggcgtcaatacgggataataccgcgccacatagcagaactttaaaagtgctcatcattggaaaacgttcttcggggcgaaaactctcaaggatcttaccgctgttgagatccagttcgatgtaacccactcgtgcacccaactgatcttcagcatcttttactttcaccagcgtttctgggtgagcaaaaacaggaaggcaaaatgccgcaaaaaagggaataagggcgacacggaaatgttgaatactcatactcttcctttttcaatattattgaagcatttatcagggttattgtctcatgagcggatacatatttgaatgtatttagaaaaataaacaaataggggttccgcgcacatttccccgaaaagtgccacctgaacgaagcatctgtgcttcattttgtagaacaaaaatgcaacgcgagagcgctaatttttcaaacaaagaatctgagctgcatttttacagaacagaaatgcaacgcgaaagcgctattttaccaacgaagaatctgtgcttcatttttgtaaaacaaaaatgcaacgcgagagcgctaatttttcaaacaaagaatctgagctgcatttttacagaacagaaatgcaacgcgagagcgctattttaccaacaaagaatctatacttcttttttgttctacaaaaatgcatcccgagagcgctatttttctaacaaagcatcttagattactttttttctcctttgtgcgctctataatgcagtctcttgataactttttgcactgtaggtccgttaaggttagaagaaggctactttggtgtctattttctcttccataaaaaaagcctgactccacttcccgcgtttactgattactagcgaagctgcgggtgcattttttcaagataaaggcatccccgattatattctataccgatgtggattgcgcatactttgtgaacagaaagtgatagcgttgatgattcttcattggtcagaaaattatgaacggtttcttctattttgtctctatatactacgtataggaaatgtttacattttcgtattgttttcgattcactctatgaatagttcttactacaatttttttgtctaaagagtaatactagagataaacataaaaaatgtagaggtcgagtttagatgcaagttcaaggagcgaaaggtggatgggtaggttatatagggatatagcacagagatatatagcaaagagatacttttgagcaatgtttgtggaagcggtattcgcaatattttagtagctcgttacagtccggtgcgtttttggttttttgaaagtgcgtcttcagagcgcttttggttttcaaaagcgctctgaagttcctatactttctagagaataggaacttcggaataggaacttcaaagcgtttccgaaaacgagcgcttccgaaaatgcaacgcgagctgcgcacatacagctcactgttcacgtcgcacctatatctgcgtgttgcctgtatatatatatacatgagaagaacggcatagtgcgtgtttatgcttaaatgcgtacttatatgcgtctatttatgtaggatgaaaggtagtctagtacctcctgtgatattatcccattccatgcggggtatcgtatgcttccttcagcactaccctttagctgttctatatgctgccactcctcaattggattagtctcatccttcaatgctatcatttcctttgatattggatcatactaagaaaccattattatcatgacattaacctataaaaataggcgtatcacgaggccctttcgtctcgcgcgtttcggtgatgacggtgaaaacctctgacacatgcagctcccggagacggtcacagcttgtctgtaagcggatgccgggagcagacaagcccgtcagggcgcgtcagcgggtgttggcgggtgtcggggctggcttaactatgcggcatcagagcagattgtactgagagtgcaccatatcgactacgtcgtaaggccgtttctgacagagtaaaattcttgagggaactttcaccattatgggaaatgcttcaagaaggtattgacttaaactccatcaaatggtcaggtcattgagtgttttttatttgttgtatttttttttttttagagaaaatcctccaatatcaaattaggaatcgtagtttcatgattttctgttacacctaactttttgtgtggtgccctcctccttgtcaatattaatgttaaagtgcaattctttttccttatcacgttgagccattagtatcaatttgcttacctgtattcctttactatcctcctttttctccttcttgataaatgtatgtagattgcgtatatagtttcgtctaccctatgaacatattccattttgtaatttcgtgtcgtttctattatgaatttcatttataaagtttatgtacaaatatcataaaaaaagagaatctttttaagcaaggattttcttaacttcttcggcgacagcatcaccgacttcggtggtactgttggaaccacctaaatcaccagttctgatacctgcatccaaaacctttttaactgcatcttcaatggccttaccttcttcaggcaagttcaatgacaatttcaacatcattgcagcagacaagatagtggcgatagggtcaaccttattctttggcaaatctggagcagaaccgtggcatggttcgtacaaaccaaatgcggtgttcttgtctggcaaagaggccaaggacgcagatggcaacaaacccaaggaacctgggataacggaggcttcatcggagatgatatcaccaaacatgttgctggtgattataataccatttaggtgggttgggttcttaactaggatcatggcggcagaatcaatcaattgatgttgaaccttcaatgtagggaattcgttcttgatggtttcctccacagtttttctccataatcttgaagaggccaaaagattagctttatccaaggaccaaataggcaatggtggctcatgttgtagggccatgaaagcggccattcttgtgattctttgcacttctggaacggtgtattgttcactatcccaagcgacaccatcaccatcgtcttcctttctcttaccaaagtaaatacctcccactaattctctgacaacaacgaagtcagtacctttagcaaattgtggcttgattggagataagtctaaaagagagtcggatgcaaagttacatggtcttaagttggcgtacaattgaagttctttacggatttttagtaaaccttgttcaggtctaacactaccggtaccccatttaggaccagccacagcacctaacaaaacggcatcaaccttcttggaggcttccagcgcctcatctggaagtgggacacctgtagcatcgatagcagcaccaccaattaaatgattttcgaaatcgaacttgacattggaacgaacatcagaaatagctttaagaaccttaatggcttcggctgtgatttcttgaccaacgtggtcacctggcaaaacgacgatcttcttaggggcagacataggggcagacattagaatggtatatccttgaaatatatatatatattgctgaaatgtaaaaggtaagaaaagttagaaagtaagacgattgctaaccacctattggaaaaaacaataggtccttaaataatattgtcaacttcaagtattgtgatgcaagcatttagtcatgaacgcttctctattctatatgaaaagccggttccggcctctcacctttcctttttctcccaatttttcagttgaaaaaggtatatgcgtcaggcgacctctgaaattaacaaaaaatttccagtcatcgaatttgattctgtgcgatagcgcccctgtgtgttctcgttatgttgaggaaaaaaataatggttgctaagagattcgaactcttgcatcttacgatacctgagtattcccacagttaactgcggtcaagatatttcttgaatcaggcgccttagaccgctcggccaaacaaccaattacttgttgagaaatagagtataattatcctataaatataacgtttttgaacacacatgaacaaggaagtacaggacaattgattttgaagagaatgtggattttgatgtaattgttgggattccatttttaataaggcaataatattaggtatgtggatatactagaagttctcctcgaccgtcgatatgcggtgtgaaataccgcacagatgcgtaaggagaaaataccgcatcaggaaattgtaaacgttaatattttgttaaaattcgcgttaaatttttgttaaatcagctcattttttaaccaataggccgaaatcggcaaaatcccttataaatcaaaagaatagaccgagatagggttgagtgttgttccagtttggaacaagagtccactattaaagaacgtggactccaacgtcaaagggcgaaaaaccgtctatcagggcgatggcccactacgtgaaccatcaccctaatcaagttttttggggtcgaggtgccgtaaagcactaaatcggaaccctaaagggagcccccgatttagagcttgacggggaaagccggcgaacgtggcgagaaaggaagggaagaaagcgaaaggagcgggcgctagggcgctggcaagtgtagcggtcacgctgcgcgtaaccaccacacccgccgcgcttaatgcgccgctacagggcgcgtcgcgccattcgccattcaggctgcgcaactgttgggaagggcgatcggtgcgggcctcttcgctattacgccagctggcgaaagggggatgtgctgcaaggcgattaagttgggtaacgccagggttttcccagtcacgacgttgtaaaacgacggccagtgagcgcgcgtaatacgactcactatagggcgaattgggtaccgggccccccctcgaggtcgacggtatcgataagcttgatatcgaattcctgcagcccgggggatccgttagaatcattttgaataaaaaacacgctttttcagttcgagtttatcattatcaatactgccatttcaaagaatacgtaaataattaatagtagtgattttcctaactttatttagtcaaaaaattagccttttaattctgctgtaacccgtacatgcccaaaatagggggcgggttacacagaatatataacatcgtaggtgtctgggtgaacagtttattcctggcatccactaaatataatggagcccgctttttaagctggcatccagaaaaaaaaagaatcccagcaccaaaatattgttttcttcaccaaccatcagttcataggtccattctcttagcgcaactacagagaacaggggcacaaacaggcaaaaaacgggcacaacctcaatggagtgatgcaacctgcctggagtaaatgatgacacaaggcaattgacccacgcatgtatctatctcattttcttacaccttctattaccttctgctctctctgatttggaaaaagctgaaaaaaaaggttgaaaccagttccctgaaattattcccctacttgactaataagtatataaagacggtaggtattgattgtaattctgtaaatctatttcttaaacttcttaaattctacttttatagttagtcttttttttagttttaaaacaccaagaacttagtttcgaataaacacacataaacaaacaaagaattc

SEQ ID NO: 731 - DNA, 9225 bp, synthetic construct
  misc_feature 1..9225: note = Synthetic
  source 1..9225: mol_type = other DNA
atgtctaaaggtgaagaattattcactggtgttgtcccaattttggttgaattagatggtgatgttaatggtcacaaattttctgtctccggtgaaggtgaaggtgatgctacttacggtaaattgaccttaaaatttatttgtactactggtaaattgccagttccatggccaaccttagtcactactttcggttatggtgttcaatgttttgctagatacccagatcatatgaaacaacatgactttttcaagtctgccatgccagaaggttatgttcaagaaagaactatttttttcaaagatgacggtaactacaagaccagagctgaagtcaagtttgaaggtgataccttagttaatagaatcgaattaaaaggtattgattttaaagaagatggtaacattttaggtcacaaattggaatacaactataactctcacaatgtttacatcatggctgacaaacaaaagaatggtatcaaagttaacttcaaaattagacacaacattgaagatggttctgttcaattagctgaccattatcaacaaaatactccaattggtgatggtccagtcttgttaccagacaaccattacttatccactcaatctgccttatccaaagatccaaacgaaaagagagaccacatggtcttgttagaatttgttactgctgctggtattacccatggtatggatgaattgtacaaagctagcaaacctgggtcaatccttggggcccagactgagcacgtgatggcagagcacaggagacgtcatggtttcaaaaggtgaagaagataatatggctattattaaagaatttatgagatttaaagttcatatggaaggttcagttaatggtcatgaatttgaaattgaaggtgaaggtgaaggtagaccatatgaaggtactcaaactgctaaattgaaagttactaaaggtggtccattaccatttgcttgggatattttgtcaccacaatttatgtatggttcaaaagcttatgttaaacatccagctgatattccagattatttaaaattgtcatttccagaaggttttaaatgggaaagagttatgaattttgaagatggtggtgttgttactgttactcaagattcatcattacaagatggtgaatttatttataaagttaaattgagaggtactaattttccatcagatggtccagttatgcaaaaaaaaactatgggttgggaagcttcatcagaaagaatgtatccagaagatggtgctttaaaaggtgaaattaaacaaagattgaaattaaaagatggtggtcattatgatgctgaagttaaaactacttataaagctaaaaaaccagttcaattaccaggtgcttataatgttaatattaaattggatattacttcacataatgaagattatactattgttgaacaatatgaaagagctgaaggtagacattcaactggtggtatggatgaattatataaaggtaccgctcgagcagctgtgattgattgagtcgacttggttgaacacgttgccaaggcttaagtgaatttactttaaatcttgcatttaaataaattttctttttatagctttatgacttagtttcaatttatatactattttaatgacattttcgattcggatccactagttctagagcggccgccaccgcggtggagctccagcttttgttccctttagtgagggttaattgcgcgcttggcgtaatcatggtcatagctgtttcctgtgtgaaattgttatccgctcacaattccacacaacataggagccggaagcataaagtgtaaagcctggggtgcctaatgagtgaggtaactcacattaattgcgttgcgctcactgcccgctttccagtcgggaaacctgtcgtgccagctgcattaatgaatcggccaacgcgcggggagaggcggtttgcgtattgggcgctcttccgcttcctcgctcactgactcgctgcgctcggtcgttcggctgcggcgagcggtatcagctcactcaaaggcggtaatacggttatccacagaatcaggggataacgcaggaaagaacatgtgagcaaaaggccagcaaaaggccaggaaccgtaaaaaggccgcgttgctggcgtttttccataggctccgcccccctgacgagcatcacaaaaatcgacgctcaagtcagaggtggcgaaacccgacaggactataaagataccaggcgtttccccctggaagctccctcgtgcgctctcctgttccgaccctgccgcttaccggatacctgtccgcctttctcccttcgggaagcgtggcgctttctcatagctcacgctgtaggtatctcagttcggtgtaggtcgttcgctccaagctgggctgtgtgcacgaaccccccgttcagcccgaccgctgcgccttatccggtaactatcgtcttgagtccaacccggtaagacacgacttatcgccactggcagcagccactggtaacaggattagcagagcgaggtatgtaggcggtgctacagagttcttgaagtggtggcctaactacggctacactagaaggacagtatttggtatctgcgctctgctgaagccagttaccttcggaaaaagagttggtagctcttgatccggcaaacaaaccaccgctggtagcggtggtttttttgtttgcaagcagcagattacgcgcagaaaaaaaggatctcaagaagatcctttgatcttttctacggggtctgacgctcagtggaacgaaaactcacgttaagggattttggtcatgagattatcaaaaaggatcttcacctagatccttttaaattaaaaatgaagttttaaatcaatctaaagtatatatgagtaaacttggtctgacagttaccaatgcttaatcagtgaggcacctatctcagcgatctgtctatttcgttcatccatagttgcctgactccccgtcgtgtagataactacgatacgggagggcttaccatctggccccagtgctgcaatgataccgcgagacccacgctcaccggctccagatttatcagcaataaaccagccagccggaagggccgagcgcagaagtggtcctgcaactttatccgcctccatccagtctattaattgttgccgggaagctagagtaagtagttcgccagttaatagtttgcgcaacgttgttgccattgctacaggcatcgtggtgtcacgctcgtcgtttggtatggcttcattcagctccggttcccaacgatcaaggcgagttacatgatcccccatgttgtgcaaaaaagcggttagctccttcggtcctccgatcgttgtcagaagtaagttggccgcagtgttatcactcatggttatggcagcactgcataattctcttactgtcatgccatccgtaagatgcttttctgtgactggtgagtactcaaccaagtcattctgagaatagtgtatgcggcgaccgagttgctcttgcccggcgtcaatacgggataataccgcgccacatagcagaactttaaaagtgctcatcattggaaaacgttcttcggggcgaaaactctcaaggatcttaccgctgttgagatccagttcgatgtaacccactcgtgcacccaactgatcttcagcatcttttactttcaccagcgtttctgggtgagcaaaaacaggaaggcaaaatgccgcaaaaaagggaataagggcgacacggaaatgttgaatactcatactcttcctttttcaatattattgaagcatttatcagggttattgtctcatgagcggatacatatttgaatgtatttagaaaaataaacaaataggggttccgcgcacatttccccgaaaagtgccacctgaacgaagcatctgtgcttcattttgtagaacaaaaatgcaacgcgagagcgctaatttttcaaacaaagaatctgagctgcatttttacagaacagaaatgcaacgcgaaagcgctattttaccaacgaagaatctgtgcttcatttttgtaaaacaaaaatgcaacgcgagagcgctaatttttcaaacaaagaatctgagctgcatttttacagaacagaaatgcaacgcgagagcgctattttaccaacaaagaatctatacttcttttttgttctacaaaaatgcatcccgagagcgctatttttctaacaaagcatcttagattactttttttctcctttgtgcgctctataatgcagtctcttgataactttttgcactgtaggtccgttaaggttagaagaaggctactttggtgtctattttctcttccataaaaaaagcctgactccacttcccgcgtttactgattactagcgaagctgcgggtgcattttttcaagataaaggcatccccgattatattctataccgatgtggattgcgcatactttgtgaacagaaagtgatagcgttgatgattcttcattggtcagaaaattatgaacggtttcttctattttgtctctatatactacgtataggaaatgtttacattttcgtattgttttcgattcactctatgaatagttcttactacaatttttttgtctaaagagtaatactagagataaacataaaaaatgtagaggtcgagtttagatgcaagttcaaggagcgaaaggtggatgggtaggttatatagggatatagcacagagatatatagcaaagagatacttttgagcaatgtttgtggaagcggtattcgcaatattttagtagctcgttacagtccggtgcgtttttggttttttgaaagtgcgtcttcagagcgcttttggttttcaaaagcgctctgaagttcctatactttctagagaataggaacttcggaataggaacttcaaagcgtttccgaaaacgagcgcttccgaaaatgcaacgcgagctgcgcacatacagctcactgttcacgtcgcacctatatctgcgtgttgcctgtatatatatatacatgagaagaacggcatagtgcgtgtttatgcttaaatgcgtacttatatgcgtctatttatgtaggatgaaaggtagtctagtacctcctgtgatattatcccattccatgcggggtatcgtatgcttccttcagcactaccctttagctgttctatatgctgccactcctcaattggattagtctcatccttcaatgctatcatttcctttgatattggatcatactaagaaaccattattatcatgacattaacctataaaaataggcgtatcacgaggccctttcgtctcgcgcgtttcggtgatgacggtgaaaacctctgacacatgcagctcccggagacggtcacagcttgtctgtaagcggatgccgggagcagacaagcccgtcagggcgcgtcagcgggtgttggcgggtgtcggggctggcttaactatgcggcatcagagcagattgtactgagagtgcaccatatcgactacgtcgtaaggccgtttctgacagagtaaaattcttgagggaactttcaccattatgggaaatgcttcaagaaggtattgacttaaactccatcaaatggtcaggtcattgagtgttttttatttgttgtatttttttttttttagagaaaatcctccaatatcaaattaggaatcgtagtttcatgattttctgttacacctaactttttgtgtggtgccctcctccttgtcaatattaatgttaaagtgcaattctttttccttatcacgttgagccattagtatcaatttgcttacctgtattcctttactatcctcctttttctccttcttgataaatgtatgtagattgcgtatatagtttcgtctaccctatgaacatattccattttgtaatttcgtgtcgtttctattatgaatttcatttataaagtttatgtacaaatatcataaaaaaagagaatctttttaagcaaggattttcttaacttcttcggcgacagcatcaccgacttcggtggtactgttggaaccacctaaatcaccagttctgatacctgcatccaaaacctttttaactgcatcttcaatggccttaccttcttcaggcaagttcaatgacaatttcaacatcattgcagcagacaagatagtggcgatagggtcaaccttattctttggcaaatctggagcagaaccgtggcatggttcgtacaaaccaaatgcggtgttcttgtctggcaaagaggccaaggacgcagatggcaacaaacccaaggaacctgggataacggaggcttcatcggagatgatatcaccaaacatgttgctggtgattataataccatttaggtgggttgggttcttaactaggatcatggcggcagaatcaatcaattgatgttgaaccttcaatgtagggaattcgttcttgatggtttcctccacagtttttctccataatcttgaagaggccaaaagattagctttatccaaggaccaaataggcaatggtggctcatgttgtagggccatgaaagcggccattcttgtgattctttgcacttctggaacggtgtattgttcactatcccaagcgacaccatcaccatcgtcttcctttctcttaccaaagtaaatacctcccactaattctctgacaacaacgaagtcagtacctttagcaaattgtggcttgattggagataagtctaaaagagagtcggatgcaaagttacatggtcttaagttggcgtacaattgaagttctttacggatttttagtaaaccttgttcaggtctaacactaccggtaccccatttaggaccagccacagcacctaacaaaacggcatcaaccttcttggaggcttccagcgcctcatctggaagtgggacacctgtagcatcgatagcagcaccaccaattaaatgattttcgaaatcgaacttgacattggaacgaacatcagaaatagctttaagaaccttaatggcttcggctgtgatttcttgaccaacgtggtcacctggcaaaacgacgatcttcttaggggcagacataggggcagacattagaatggtatatccttgaaatatatatatatattgctgaaatgtaaaaggtaagaaaagttagaaagtaagacgattgctaaccacctattggaaaaaacaataggtccttaaataatattgtcaacttcaagtattgtgatgcaagcatttagtcatgaacgcttctctattctatatgaaaagccggttccggcctctcacctttcctttttctcccaatttttcagttgaaaaaggtatatgcgtcaggcgacctctgaaattaacaaaaaatttccagtcatcgaatttgattctgtgcgatagcgcccctgtgtgttctcgttatgttgaggaaaaaaataatggttgctaagagattcgaactcttgcatcttacgatacctgagtattcccacagttaactgcggtcaagatatttcttgaatcaggcgccttagaccgctcggccaaacaaccaattacttgttgagaaatagagtataattatcctataaatataacgtttttgaacacacatgaacaaggaagtacaggacaattgattttgaagagaatgtggattttgatgtaattgttgggattccatttttaataaggcaataatattaggtatgtggatatactagaagttctcctcgaccgtcgatatgcggtgtgaaataccgcacagatgcgtaaggagaaaataccgcatcaggaaattgtaaacgttaatattttgttaaaattcgcgttaaatttttgttaaatcagctcattttttaaccaataggccgaaatcggcaaaatcccttataaatcaaaagaatagaccgagatagggttgagtgttgttccagtttggaacaagagtccactattaaagaacgtggactccaacgtcaaagggcgaaaaaccgtctatcagggcgatggcccactacgtgaaccatcaccctaatcaagttttttggggtcgaggtgccgtaaagcactaaatcggaaccctaaagggagcccccgatttagagcttgacggggaaagccggcgaacgtggcgagaaaggaagggaagaaagcgaaaggagcgggcgctagggcgctggcaagtgtagcggtcacgctgcgcgtaaccaccacacccgccgcgcttaatgcgccgctacagggcgcgtcgcgccattcgccattcaggctgcgcaactgttgggaagggcgatcggtgcgggcctcttcgctattacgccagctggcgaaagggggatgtgctgcaaggcgattaagttgggtaacgccagggttttcccagtcacgacgttgtaaaacgacggccagtgagcgcgcgtaatacgactcactatagggcgaattgggtaccgggccccccctcgaggtcgacggtatcgataagcttgatatcgaattcctgcagcccgggggatccgttagaatcattttgaataaaaaacacgctttttcagttcgagtttatcattatcaatactgccatttcaaagaatacgtaaataattaatagtagtgattttcctaactttatttagtcaaaaaattagccttttaattctgctgtaacccgtacatgcccaaaatagggggcgggttacacagaatatataacatcgtaggtgtctgggtgaacagtttattcctggcatccactaaatataatggagcccgctttttaagctggcatccagaaaaaaaaagaatcccagcaccaaaatattgttttcttcaccaaccatcagttcataggtccattctcttagcgcaactacagagaacaggggcacaaacaggcaaaaaacgggcacaacctcaatggagtgatgcaacctgcctggagtaaatgatgacacaaggcaattgacccacgcatgtatctatctcattttcttacaccttctattaccttctgctctctctgatttggaaaaagctgaaaaaaaaggttgaaaccagttccctgaaattattcccctacttgactaataagtatataaagacggtaggtattgattgtaattctgtaaatctatttcttaaacttcttaaattctacttttatagttagtcttttttttagttttaaaacaccaagaacttagtttcgaataaacacacataaacaaacaaagaattc

SEQ ID NO: 732 - DNA, 9223 bp, synthetic construct
  misc_feature 1..9223: note = Synthetic
  source 1..9223: mol_type = other DNA
atgtctaaaggtgaagaattattcactggtgttgtcccaattttggttgaattagatggtgatgttaatggtcacaaattttctgtctccggtgaaggtgaaggtgatgctacttacggtaaattgaccttaaaatttatttgtactactggtaaattgccagttccatggccaaccttagtcactactttcggttatggtgttcaatgttttgctagatacccagatcatatgaaacaacatgactttttcaagtctgccatgccagaaggttatgttcaagaaagaactatttttttcaaagatgacggtaactacaagaccagagctgaagtcaagtttgaaggtgataccttagttaatagaatcgaattaaaaggtattgattttaaagaagatggtaacattttaggtcacaaattggaatacaactataactctcacaatgtttacatcatggctgacaaacaaaagaatggtatcaaagttaacttcaaaattagacacaacattgaagatggttctgttcaattagctgaccattatcaacaaaatactccaattggtgatggtccagtcttgttaccagacaaccattacttatccactcaatctgccttatccaaagatccaaacgaaaagagagaccacatggtcttgttagaatttgttactgctgctggtattacccatggtatggatgaattgtacaaagctagcaaacctgggtcaatccttggggcccagactgagcacgtgatggcagagcacaggacgtcatggtttcaaaaggtgaagaagataatatggctattattaaagaatttatgagatttaaagttcatatggaaggttcagttaatggtcatgaatttgaaattgaaggtgaaggtgaaggtagaccatatgaaggtactcaaactgctaaattgaaagttactaaaggtggtccattaccatttgcttgggatattttgtcaccacaatttatgtatggttcaaaagcttatgttaaacatccagctgatattccagattatttaaaattgtcatttccagaaggttttaaatgggaaagagttatgaattttgaagatggtggtgttgttactgttactcaagattcatcattacaagatggtgaatttatttataaagttaaattgagaggtactaattttccatcagatggtccagttatgcaaaaaaaaactatgggttgggaagcttcatcagaaagaatgtatccagaagatggtgctttaaaaggtgaaattaaacaaagattgaaattaaaagatggtggtcattatgatgctgaagttaaaactacttataaagctaaaaaaccagttcaattaccaggtgcttataatgttaatattaaattggatattacttcacataatgaagattatactattgttgaacaatatgaaagagctgaaggtagacattcaactggtggtatggatgaattatataaaggtaccgctcgagcagctgtgattgattgagtcgacttggttgaacacgttgccaaggcttaagtgaatttactttaaatcttgcatttaaataaattttctttttatagctttatgacttagtttcaatttatatactattttaatgacattttcgattcggatccactagttctagagcggccgccaccgcggtggagctccagcttttgttccctttagtgagggttaattgcgcgcttggcgtaatcatggtcatagctgtttcctgtgtgaaattgttatccgctcacaattccacacaacataggagccggaagcataaagtgtaaagcctggggtgcctaatgagtgaggtaactcacattaattgcgttgcgctcactgcccgctttccagtcgggaaacctgtcgtgccagctgcattaatgaatcggccaacgcgcggggagaggcggtttgcgtattgggcgctcttccgcttcctcgctcactgactcgctgcgctcggtcgttcggctgcggcgagcggtatcagctcactcaaaggcggtaatacggttatccacagaatcaggggataacgcaggaaagaacatgtgagcaaaaggccagcaaaaggccaggaaccgtaaaaaggccgcgttgctggcgtttttccataggctccgcccccctgacgagcatcacaaaaatcgacgctcaagtcagaggtggcgaaacccgacaggactataaagataccaggcgtttccccctggaagctccctcgtgcgctctcctgttccgaccctgccgcttaccggatacctgtccgcctttctcccttcgggaagcgtggcgctttctcatagctcacgctgtaggtatctcagttcggtgtaggtcgttcgctccaagctgggctgtgtgcacgaaccccccgttcagcccgaccgctgcgccttatccggtaactatcgtcttgagtccaacccggtaagacacgacttatcgccactggcagcagccactggtaacaggattagcagagcgaggtatgtaggcggtgctacagagttcttgaagtggtggcctaactacggctacactagaaggacagtatttggtatctgcgctctgctgaagccagttaccttcggaaaaagagttggtagctcttgatccggcaaacaaaccaccgctggtagcggtggtttttttgtttgcaagcagcagattacgcgcagaaaaaaaggatctcaagaagatcctttgatcttttctacggggtctgacgctcagtggaacgaaaactcacgttaagggattttggtcatgagattatcaaaaaggatcttcacctagatccttttaaattaaaaatgaagttttaaatcaatctaaagtatatatgagtaaacttggtctgacagttaccaatgcttaatcagtgaggcacctatctcagcgatctgtctatttcgttcatccatagttgcctgactccccgtcgtgtagataactacgatacgggagggcttaccatctggccccagtgctgcaatgataccgcgagacccacgctcaccggctccagatttatcagcaataaaccagccagccggaagggccgagcgcagaagtggtcctgcaactttatccgcctccatccagtctattaattgttgccgggaagctagagtaagtagttcgccagttaatagtttgcgcaacgttgttgccattgctacaggcatcgtggtgtcacgctcgtcgtttggtatggcttcattcagctccggttcccaacgatcaaggcgagttacatgatcccccatgttgtgcaaaaaagcggttagctccttcggtcctccgatcgttgtcagaagtaagttggccgcagtgttatcactcatggttatggcagcactgcataattctcttactgtcatgccatccgtaagatgcttttctgtgactggtgagtactcaaccaagtcattctgagaatagtgtatgcggcgaccgagttgctcttgcccggcgtcaatacgggataataccgcgccacatagcagaactttaaaagtgctcatcattggaaaacgttcttcggggcgaaaactctcaaggatcttaccgctgttgagatccagttcgatgtaacccactcgtgcacccaactgatcttcagcatcttttactttcaccagcgtttctgggtgagcaaaaacaggaaggcaaaatgccgcaaaaaagggaataagggcgacacggaaatgttgaatactcatactcttcctttttcaatattattgaagcatttatcagggttattgtctcatgagcggatacatatttgaatgtatttagaaaaataaacaaataggggttccgcgcacatttccccgaaaagtgccacctgaacgaagcatctgtgcttcattttgtagaacaaaaatgcaacgcgagagcgctaatttttcaaacaaagaatctgagctgcatttttacagaacagaaatgcaacgcgaaagcgctattttaccaacgaagaatctgtgcttcatttttgtaaaacaaaaatgcaacgcgagagcgctaatttttcaaacaaagaatctgagctgcatttttacagaacagaaatgcaacgcgagagcgctattttaccaacaaagaatctatacttcttttttgttctacaaaaatgcatcccgagagcgctatttttctaacaaagcatcttagattactttttttctcctttgtgcgctctataatgcagtctcttgataactttttgcactgtaggtccgttaaggttagaagaaggctactttggtgtctattttctcttccataaaaaaagcctgactccacttcccgcgtttactgattactagcgaagctgcgggtgcattttttcaagataaaggcatccccgattatattctataccgatgtggattgcgcatactttgtgaacagaaagtgatagcgttgatgattcttcattggtcagaaaattatgaacggtttcttctattttgtctctatatactacgtataggaaatgtttacattttcgtattgttttcgattcactctatgaatagttcttactacaatttttttgtctaaagagtaatactagagataaacataaaaaatgtagaggtcgagtttagatgcaagttcaaggagcgaaaggtggatgggtaggttatatagggatatagcacagagatatatagcaaagagatacttttgagcaatgtttgtggaagcggtattcgcaatattttagtagctcgttacagtccggtgcgtttttggttttttgaaagtgcgtcttcagagcgcttttggttttcaaaagcgctctgaagttcctatactttctagagaataggaacttcggaataggaacttcaaagcgtttccgaaaacgagcgcttccgaaaatgcaacgcgagctgcgcacatacagctcactgttcacgtcgcacctatatctgcgtgttgcctgtatatatatatacatgagaagaacggcatagtgcgtgtttatgcttaaatgcgtacttatatgcgtctatttatgtaggatgaaaggtagtctagtacctcctgtgatattatcccattccatgcggggtatcgtatgcttccttcagcactaccctttagctgttctatatgctgccactcctcaattggattagtctcatccttcaatgctatcatttcctttgatattggatcatactaagaaaccattattatcatgacattaacctataaaaataggcgtatcacgaggccctttcgtctcgcgcgtttcggtgatgacggtgaaaacctctgacacatgcagctcccggagacggtcacagcttgtctgtaagcggatgccgggagcagacaagcccgtcagggcgcgtcagcgggtgttggcgggtgtcggggctggcttaactatgcggcatcagagcagattgtactgagagtgcaccatatcgactacgtcgtaaggccgtttctgacagagtaaaattcttgagggaactttcaccattatgggaaatgcttcaagaaggtattgacttaaactccatcaaatggtcaggtcattgagtgttttttatttgttgtatttttttttttttagagaaaatcctccaatatcaaattaggaatcgtagtttcatgattttctgttacacctaactttttgtgtggtgccctcctccttgtcaatattaatgttaaagtgcaattctttttccttatcacgttgagccattagtatcaatttgcttacctgtattcctttactatcctcctttttctccttcttgataaatgtatgtagattgcgtatatagtttcgtctaccctatgaacatattccattttgtaatttcgtgtcgtttctattatgaatttcatttataaagtttatgtacaaatatcataaaaaaagagaatctttttaagcaaggattttcttaacttcttcggcgacagcatcaccgacttcggtggtactgttggaaccacctaaatcaccagttctgatacctgcatccaaaacctttttaactgcatcttcaatggccttaccttcttcaggcaagttcaatgacaatttcaacatcattgcagcagacaagatagtggcgatagggtcaaccttattctttggcaaatctggagcagaaccgtggcatggttcgtacaaaccaaatgcggtgttcttgtctggcaaagaggccaaggacgcagatggcaacaaacccaaggaacctgggataacggaggcttcatcggagatgatatcaccaaacatgttgctggtgattataataccatttaggtgggttgggttcttaactaggatcatggcggcagaatcaatcaattgatgttgaaccttcaatgtagggaattcgttcttgatggtttcctccacagtttttctccataatcttgaagaggccaaaagattagctttatccaaggaccaaataggcaatggtggctcatgttgtagggccatgaaagcggccattcttgtgattctttgcacttctggaacggtgtattgttcactatcccaagcgacaccatcaccatcgtcttcctttctcttaccaaagtaaatacctcccactaattctctgacaacaacgaagtcagtacctttagcaaattgtggcttgattggagataagtctaaaagagagtcggatgcaaagttacatggtcttaagttggcgtacaattgaagttctttacggatttttagtaaaccttgttcaggtctaacactaccggtaccccatttaggaccagccacagcacctaacaaaacggcatcaaccttcttggaggcttccagcgcctcatctggaagtgggacacctgtagcatcgatagcagcaccaccaattaaatgattttcgaaatcgaacttgacattggaacgaacatcagaaatagctttaagaaccttaatggcttcggctgtgatttcttgaccaacgtggtcacctggcaaaacgacgatcttcttaggggcagacataggggcagacattagaatggtatatccttgaaatatatatatatattgctgaaatgtaaaaggtaagaaaagttagaaagtaagacgattgctaaccacctattggaaaaaacaataggtccttaaataatattgtcaacttcaagtattgtgatgcaagcatttagtcatgaacgcttctctattctatatgaaaagccggttccggcctctcacctttcctttttctcccaatttttcagttgaaaaaggtatatgcgtcaggcgacctctgaaattaacaaaaaatttccagtcatcgaatttgattctgtgcgatagcgcccctgtgtgttctcgttatgttgaggaaaaaaataatggttgctaagagattcgaactcttgcatcttacgatacctgagtattcccacagttaactgcggtcaagatatttcttgaatcaggcgccttagaccgctcggccaaacaaccaattacttgttgagaaatagagtataattatcctataaatataacgtttttgaacacacatgaacaaggaagtacaggacaattgattttgaagagaatgtggattttgatgtaattgttgggattccatttttaataaggcaataatattaggtatgtggatatactagaagttctcctcgaccgtcgatatgcggtgtgaaataccgcacagatgcgtaaggagaaaataccgcatcaggaaattgtaaacgttaatattttgttaaaattcgcgttaaatttttgttaaatcagctcattttttaaccaataggccgaaatcggcaaaatcccttataaatcaaaagaatagaccgagatagggttgagtgttgttccagtttggaacaagagtccactattaaagaacgtggactccaacgtcaaagggcgaaaaaccgtctatcagggcgatggcccactacgtgaaccatcaccctaatcaagttttttggggtcgaggtgccgtaaagcactaaatcggaaccctaaagggagcccccgatttagagcttgacggggaaagccggcgaacgtggcgagaaaggaagggaagaaagcgaaaggagcgggcgctagggcgctggcaagtgtagcggtcacgctgcgcgtaaccaccacacccgccgcgcttaatgcgccgctacagggcgcgtcgcgccattcgccattcaggctgcgcaactgttgggaagggcgatcggtgcgggcctcttcgctattacgccagctggcgaaagggggatgtgctgcaaggcgattaagttgggtaacgccagggttttcccagtcacgacgttgtaaaacgacggccagtgagcgcgcgtaatacgactcactatagggcgaattgggtaccgggccccccctcgaggtcgacggtatcgataagcttgatatcgaattcctgcagcccgggggatccgttagaatcattttgaataaaaaacacgctttttcagttcgagtttatcattatcaatactgccatttcaaagaatacgtaaataattaatagtagtgattttcctaactttatttagtcaaaaaattagccttttaattctgctgtaacccgtacatgcccaaaatagggggcgggttacacagaatatataacatcgtaggtgtctgggtgaacagtttattcctggcatccactaaatataatggagcccgctttttaagctggcatccagaaaaaaaaagaatcccagcaccaaaatattgttttcttcaccaaccatcagttcataggtccattctcttagcgcaactacagagaacaggggcacaaacaggcaaaaaacgggcacaacctcaatggagtgatgcaacctgcctggagtaaatgatgacacaaggcaattgacccacgcatgtatctatctcattttcttacaccttctattaccttctgctctctctgatttggaaaaagctgaaaaaaaaggttgaaaccagttccctgaaattattcccctacttgactaataagtatataaagacggtaggtattgattgtaattctgtaaatctatttcttaaacttcttaaattctacttttatagttagtcttttttttagttttaaaacaccaagaacttagtttcgaataaacacacataaacaaacaaagaattc

SEQ ID NO: 733 - DNA, 9753 bp, synthetic construct
  misc_feature 1..9753: note = Synthetic
  source 1..9753: mol_type = other DNA
atgaaacggacagccgacggaagcgagttcgagtcaccaaagaagaagcggaaagtcgacaagaagtacagcatcggcctggacatcggcaccaactctgtgggctgggccgtgatcaccgacgagtacaaggtgcccagcaagaaattcaaggtgctgggcaacaccgaccggcacagcatcaagaagaacctgatcggagccctgctgttcgacagcggcgaaacagccgaggccacccggctgaagagaaccgccagaagaagatacaccagacggaagaaccggatctgctatctgcaagagatcttcagcaacgagatggccaaggtggacgacagcttcttccacagactggaagagtccttcctggtggaagaggataagaagcacgagcggcaccccatcttcggcaacatcgtggacgaggtggcctaccacgagaagtaccccaccatctaccacctgagaaagaaactggtggacagcaccgacaaggccgacctgcggctgatctatctggccctggcccacatgatcaagttccggggccacttcctgatcgagggcgacctgaaccccgacaacagcgacgtggacaagctgttcatccagctggtgcagacctacaaccagctgttcgaggaaaaccccatcaacgccagcggcgtggacgccaaggccatcctgtctgccagactgagcaagagcagacggctggaaaatctgatcgcccagctgcccggcgagaagaagaatggcctgttcggaaacctgattgccctgagcctgggcctgacccccaacttcaagagcaacttcgacctggccgaggatgccaaactgcagctgagcaaggacacctacgacgacgacctggacaacctgctggcccagatcggcgaccagtacgccgacctgtttctggccgccaagaacctgtccgacgccatcctgctgagcgacatcctgagagtgaacaccgagatcaccaaggcccccctgagcgcctctatgatcaagagatacgacgagcaccaccaggacctgaccctgctgaaagctctcgtgcggcagcagctgcctgagaagtacaaagagattttcttcgaccagagcaagaacggctacgccggctacattgacggcggagccagccaggaagagttctacaagttcatcaagcccatcctggaaaagatggacggcaccgaggaactgctcgtgaagctgaacagagaggacctgctgcggaagcagcggaccttcgacaacggcagcatcccccaccagatccacctgggagagctgcacgccattctgcggcggcaggaagatttttacccattcctgaaggacaaccgggaaaagatcgagaagatcctgaccttccgcatcccctactacgtgggccctctggccaggggaaacagcagattcgcctggatgaccagaaagagcgaggaaaccatcaccccctggaacttcgaggaagtggtggacaagggcgcttccgcccagagcttcatcgagcggatgaccaacttcgataagaacctgcccaacgagaaggtgctgcccaagcacagcctgctgtacgagtacttcaccgtgtataacgagctgaccaaagtgaaatacgtgaccgagggaatgagaaagcccgccttcctgagcggcgagcagaaaaaggccatcgtggacctgctgttcaagaccaaccggaaagtgaccgtgaagcagctgaaagaggactacttcaagaaaatcgagtgcttcgactccgtggaaatctccggcgtggaagatcggttcaacgcctccctgggcacataccacgatctgctgaaaattatcaaggacaaggacttcctggacaatgaggaaaacgaggacattctggaagatatcgtgctgaccctgacactgtttgaggacagagagatgatcgaggaacggctgaaaacctatgcccacctgttcgacgacaaagtgatgaagcagctgaagcggcggagatacaccggctggggcaggctgagccggaagctgatcaacggcatccgggacaagcagtccggcaagacaatcctggatttcctgaagtccgacggcttcgccaacagaaacttcatgcagctgatccacgacgacagcctgacctttaaagaggacatccagaaagcccaggtgtccggccagggcgatagcctgcacgagcacattgccaatctggccggcagccccgccattaagaagggcatcctgcagacagtgaaggtggtggacgagctcgtgaaagtgatgggccggcacaagcccgagaacatcgtgatcgaaatggccagagagaaccagaccacccagaagggacagaagaacagccgcgagagaatgaagcggatcgaagagggcatcaaagagctgggcagccagatcctgaaagaacaccccgtggaaaacacccagctgcagaacgagaagctgtacctgtactacctgcagaatgggcgggatatgtacgtggaccaggaactggacatcaaccggctgtccgactacgatgtggacgctatcgtgcctcagagctttctgaaggacgactccatcgacaacaaggtgctgaccagaagcgacaagaaccggggcaagagcgacaacgtgccctccgaagaggtcgtgaagaagatgaagaactactggcggcagctgctgaacgccaagctgattacccagagaaagttcgacaatctgaccaaggccgagagaggcggcctgagcgaactggataaggccggcttcatcaagagacagctggtggaaacccggcagatcacaaagcacgtggcacagatcctggactcccggatgaacactaagtacgacgagaatgacaagctgatccgggaagtgaaagtgatcaccctgaagtccaagctggtgtccgatttccggaaggatttccagttttacaaagtgcgcgagatcaacaactaccaccacgcccacgacgcctacctgaacgccgtcgtgggaaccgccctgatcaaaaagtaccctaagctggaaagcgagttcgtgtacggcgactacaaggtgtacgacgtgcggaagatgatcgccaagagcgagcaggaaatcggcaaggctaccgccaagtacttcttctacagcaacatcatgaactttttcaagaccgagattaccctggccaacggcgagatccggaagcggcctctgatcgagacaaacggcgaaaccggggagatcgtgtgggataagggccgggattttgccaccgtgcggaaagtgctgagcatgccccaagtgaatatcgtgaaaaagaccgaggtgcagacaggcggcttcagcaaagagtctatcctgcccaagaggaacagcgataagctgatcgccagaaagaaggactgggaccctaagaagtacggcggcttcgacagccccaccgtggcctattctgtgctggtggtggccaaagtggaaaagggcaagtccaagaaactgaagagtgtgaaagagctgctggggatcaccatcatggaaagaagcagcttcgagaagaatcccatcgactttctggaagccaagggctacaaagaagtgaaaaaggacctgatcatcaagctgcctaagtactccctgttcgagctggaaaacggccggaagagaatgctggcctctgccggcgaactgcagaagggaaacgaactggccctgccctccaaatatgtgaacttcctgtacctggccagccactatgagaagctgaagggctcccccgaggataatgagcagaaacagctgtttgtggaacagcacaagcactacctggacgagatcatcgagcagatcagcgagttctccaagagagtgatcctggccgacgctaatctggacaaagtgctgtccgcctacaacaagcaccgggataagcccatcagagagcaggccgagaatatcatccacctgtttaccctgaccaatctgggagcccctgccgccttcaagtactttgacaccaccatcgaccggaagaggtacaccagcaccaaagaggtgctggacgccaccctgatccaccagagcatcaccggcctgtacgagacacggatcgacctgtctcagctgggaggtgactctggaggatctagcggaggatcctctggcagcgagacaccaggaacaagcgagtcagcaacaccagagagcagtggcggcagcagcggcggcagcagcaccctaaatatagaagatgagtatcggctacatgagacctcaaaagagccagatgtttctctagggtccacatggctgtctgattttcctcaggcctgggcggaaaccgggggcatgggactggcagttcgccaagctcctctgatcatacctctgaaagcaacctctacccccgtgtccataaaacaataccccatgtcacaagaagccagactggggatcaagccccacatacagagactgttggaccagggaatactggtaccctgccagtccccctggaacacgcccctgctacccgttaagaaaccagggactaatgattataggcctgtccaggatctgagagaagtcaacaagcgggtggaagacatccaccccaccgtgcccaacccttacaacctcttgagcgggctcccaccgtcccaccagtggtacactgtgcttgatttaaaggatgcctttttctgcctgagactccaccccaccagtcagcctctcttcgcctttgagtggagagatccagagatgggaatctcaggacaattgacctggaccagactcccacagggtttcaaaaacagtcccaccctgtttgatgaggcactgcacagagacctagcagacttccggatccagcacccagacttgatcctgctacagtacgtggatgacttactgctggccgccacttctgagctagactgccaacaaggtactcgggccctgttacaaaccctagggaacctcgggtatcgggcctcggccaagaaagcccaaatttgccagaaacaggtcaagtatctggggtatcttctaaaagagggtcagagatggctgactgaggccagaaaagagactgtgatggggcagcctactccgaagacccctcgacaactaagggagttcctagggacggcaggcttctgtcgcctctggatccctgggtttgcagaaatggcagcccccctgtaccctctcaccaaaacggggactctgtttaattggggcccagaccaacaaaaggcctatcaagaaatcaagcaagctcttctaactgccccagccctggggttgccagatttgactaagccctttgaactctttgtcgacgagaagcagggctacgccaaaggtgtcctaacgcaaaaactgggaccttggcgtcggccggtggcctacctgtccaaaaagctagacccagtagcagctgggtggcccccttgcctacggatggtagcagccattgccgtactgacaaaggatgcaggcaagctaaccatgggacagccactagtcattctggccccccatgcagtagaggcactagtcaaacaaccccccgaccgctggctttccaacgcccggatgactcactatcaggccttgcttttggacacggaccgggtccagttcggaccggtggtagccctgaacccggctacgctgctcccactgcctgaggaagggctgcaacacaactgccttgatatcctggccgaagcccacggaacccgacccgacctaacggaccagccgctcccagacgccgaccacacctggtacacggatggaagcagtctcttacaagagggacagcgtaaggcgggagctgcggtgaccaccgagaccgaggtaatctgggctaaagccctgccagccgggacatccgctcagcgggctgaactgatagcactcacccaggccctaaagatggcagaaggtaagaagctaaatgtttatactgatagccgttatgcttttgctactgcccatatccatggagaaatatacagaaggcgtgggttgctcacatcagaaggcaaagagatcaaaaataaagacgagatcttggccctactaaaagccctctttctgcccaaaagacttagcataatccattgtccaggacatcaaaagggacacagcgccgaggctagaggcaaccggatggctgaccaagcggcccgaaaggcagccatcacagagactccagacacctctaccctcctcatagaaaattcatcaccctctggcggctcaaaaagaaccgccgacggcagcgaattcgagcccaagaagaagaggaaagtctaaccggtcatcatcaccatcaccattgagtttaaacccgctgatcagcctcgactgtgccttctagttgccagccatctgttgtttgcccctcccccgtgccttccttgaccctggaaggtgccactcccactgtcctttcctaataaaatgagaaaattgcatcgcattgtctgagtaggtgtcattctattctggggggtggggtggggcaggacagcaagggggaggattgggaagacaatagcaggcatgctggggatgcggtgggctctatggcttctgaggcggaaagaaccagctggggctcgataccgtcgacctctagctagagcttggcgtaatcatggtcatagctgtttcctgtgtgaaattgttatccgctcacaattccacacaacatacgagccggaagcataaagtgtaaagcctagggtgcctaatgagtgagctaactcacattaattgcgttgcgctcactgcccgctttccagtcgggaaacctgtcgtgccagctgcattaatgaatcggccaacgcgcggggagaggcggtttgcgtattgggcgctcttccgcttcctcgctcactgactcgctgcgctcggtcgttcggctgcggcgagcggtatcagctcactcaaaggcggtaatacggttatccacagaatcaggggataacgcaggaaagaacatgtgagcaaaaggccagcaaaaggccaggaaccgtaaaaaggccgcgttgctggcgtttttccataggctccgcccccctgacgagcatcacaaaaatcgacgctcaagtcagaggtggcgaaacccgacaggactataaagataccaggcgtttccccctggaagctccctcgtgcgctctcctgttccgaccctgccgcttaccggatacctgtccgcctttctcccttcgggaagcgtggcgctttctcatagctcacgctgtaggtatctcagttcggtgtaggtcgttcgctccaagctgggctgtgtgcacgaaccccccgttcagcccgaccgctgcgccttatccggtaactatcgtcttgagtccaacccggtaagacacgacttatcgccactggcagcagccactggtaacaggattagcagagcgaggtatgtaggcggtgctacagagttcttgaagtggtggcctaactacggctacactagaagaacagtatttggtatctgcgctctgctgaagccagttaccttcggaaaaagagttggtagctcttgatccggcaaacaaaccaccgctggtagcggtggtttttttgtttgcaagcagcagattacgcgcagaaaaaaaggatctcaagaagatcctttgatcttttctacggggtctgacgctcagtggaacgaaaactcacgttaagggattttggtcatgagattatcaaaaaggatcttcacctagatccttttaaattaaaaatgaagttttaaatcaatctaaagtatatatgagtaaacttggtctgacagttaccaatgcttaatcagtgaggcacctatctcagcgatctgtctatttcgttcatccatagttgcctgactccccgtcgtgtagataactacgatacgggagggcttaccatctggccccagtgctgcaatgataccgcgagacccacgctcaccggctccagatttatcagcaataaaccagccagccggaagggccgagcgcagaagtggtcctgcaactttatccgcctccatccagtctattaattgttgccgggaagctagagtaagtagttcgccagttaatagtttgcgcaacgttgttgccattgctacaggcatcgtggtgtcacgctcgtcgtttggtatggcttcattcagctccggttcccaacgatcaaggcgagttacatgatcccccatgttgtgcaaaaaagcggttagctccttcggtcctccgatcgttgtcagaagtaagttggccgcagtgttatcactcatggttatggcagcactgcataattctcttactgtcatgccatccgtaagatgcttttctgtgactggtgagtactcaaccaagtcattctgagaatagtgtatgcggcgaccgagttgctcttgcccggcgtcaatacgggataataccgcgccacatagcagaactttaaaagtgctcatcattggaaaacgttcttcggggcgaaaactctcaaggatcttaccgctgttgagatccagttcgatgtaacccactcgtgcacccaactgatcttcagcatcttttactttcaccagcgtttctgggtgagcaaaaacaggaaggcaaaatgccgcaaaaaagggaataagggcgacacggaaatgttgaatactcatactcttcctttttcaatattattgaagcatttatcagggttattgtctcatgagcggatacatatttgaatgtatttagaaaaataaacaaataggggttccgcgcacatttccccgaaaagtgccacctgacgtcgacggatcgggagatcgatctcccgatcccctagggtcgactctcagtacaatctgctctgatgccgcatagttaagccagtatctgctccctgcttgtgtgttggaggtcgctgagtagtgcgcgagcaaaatttaagctacaacaaggcaaggcttgaccgacaattgcatgaagaatctgcttagggttaggcgttttgcgctgcttcgcgatgtacgggccagatatacgcgttgacattgattattgactagttattaatagtaatcaattacggggtcattagttcatagcccatatatggagttccgcgttacataacttacggtaaatggcccgcctggctgaccgcccaacgacccccgcccattgacgtcaataatgacgtatgttcccatagtaacgccaatagggactttccattgacgtcaatgggtggagtatttacggtaaactgcccacttggcagtacatcaagtgtatcatatgccaagtacgccccctattgacgtcaatgacggtaaatggcccgcctggcattatgcccagtacatgaccttatgggactttcctacttggcagtacatctacgtattagtcatcgctattaccatggtgatgcggttttggcagtacatcaatgggcgtggatagcggtttgactcacggggatttccaagtctccaccccattgacgtcaatgggagtttgttttggcaccaaaatcaacgggactttccaaaatgtcgtaacaactccgccccattgacgcaaatgggcggtaggcgtgtacggtgggaggtctatataagcagagctggtttagtgaaccgtcagatccgctagagatccgcggccgctaatacgactcactatagggagagccgccacc

SEQ ID NO: 734 - DNA, 9753 bp, synthetic construct
  misc_feature 1..9753: note = Synthetic
  source 1..9753: mol_type = other DNA
atgaaacggacagccgacggaagcgagttcgagtcaccaaagaagaagcggaaagtcgacaagaagtacagcatcggcctggacatcggcaccaactctgtgggctgggccgtgatcaccgacgagtacaaggtgcccagcaagaaattcaaggtgctgggcaacaccgaccggcacagcatcaagaagaacctgatcggagccctgctgttcgacagcggcgaaacagccgaggccacccggctgaagagaaccgccagaagaagatacaccagacggaagaaccggatctgctatctgcaagagatcttcagcaacgagatggccaaggtggacgacagcttcttccacagactggaagagtccttcctggtggaagaggataagaagcacgagcggcaccccatcttcggcaacatcgtggacgaggtggcctaccacgagaagtaccccaccatctaccacctgagaaagaaactggtggacagcaccgacaaggccgacctgcggctgatctatctggccctggcccacatgatcaagttccggggccacttcctgatcgagggcgacctgaaccccgacaacagcgacgtggacaagctgttcatccagctggtgcagacctacaaccagctgttcgaggaaaaccccatcaacgccagcggcgtggacgccaaggccatcctgtctgccagactgagcaagagcagacggctggaaaatctgatcgcccagctgcccggcgagaagaagaatggcctgttcggaaacctgattgccctgagcctgggcctgacccccaacttcaagagcaacttcgacctggccgaggatgccaaactgcagctgagcaaggacacctacgacgacgacctggacaacctgctggcccagatcggcgaccagtacgccgacctgtttctggccgccaagaacctgtccgacgccatcctgctgagcgacatcctgagagtgaacaccgagatcaccaaggcccccctgagcgcctctatgatcaagagatacgacgagcaccaccaggacctgaccctgctgaaagctctcgtgcggcagcagctgcctgagaagtacaaagagattttcttcgaccagagcaagaacggctacgccggctacattgacggcggagccagccaggaagagttctacaagttcatcaagcccatcctggaaaagatggacggcaccgaggaactgctcgtgaagctgaacagagaggacctgctgcggaagcagcggaccttcgacaacggcagcatcccccaccagatccacctgggagagctgcacgccattctgcggcggcaggaagatttttacccattcctgaaggacaaccgggaaaagatcgagaagatcctgaccttccgcatcccctactacgtgggccctctggccaggggaaacagcagattcgcctggatgaccagaaagagcgaggaaaccatcaccccctggaacttcgaggaagtggtggacaagggcgcttccgcccagagcttcatcgagcggatgaccaacttcgataagaacctgcccaacgagaaggtgctgcccaagcacagcctgctgtacgagtacttcaccgtgtataacgagctgaccaaagtgaaatacgtgaccgagggaatgagaaagcccgccttcctgagcggcgagcagaaaaaggccatcgtggacctgctgttcaagaccaaccggaaagtgaccgtgaagcagctgaaagaggactacttcaagaaaatcgagtgcttcgactccgtggaaatctccggcgtggaagatcggttcaacgcctccctgggcacataccacgatctgctgaaaattatcaaggacaaggacttcctggacaatgaggaaaacgaggacattctggaagatatcgtgctgaccctgacactgtttgaggacagagagatgatcgaggaacggctgaaaacctatgcccacctgttcgacgacaaagtgatgaagcagctgaagcggcggagatacaccggctggggcaggctgagccggaagctgatcaacggcatccgggacaagcagtccggcaagacaatcctggatttcctgaagtccgacggcttcgccaacagaaacttcatgcagctgatccacgacgacagcctgacctttaaagaggacatccagaaagcccaggtgtccggccagggcgatagcctgcacgagcacattgccaatctggccggcagccccgccattaagaagggcatcctgcagacagtgaaggtggtggacgagctcgtgaaagtgatgggccggcacaagcccgagaacatcgtgatcgaaatggccagagagaaccagaccacccagaagggacagaagaacagccgcgagagaatgaagcggatcgaagagggcatcaaagagctgggcagccagatcctgaaagaacaccccgtggaaaacacccagctgcagaacgagaagctgtacctgtactacctgcagaatgggcgggatatgtacgtggaccaggaactggacatcaaccggctgtccgactacgatgtggacgctatcgtgcctcagagctttctgaaggacgactccatcgacaacaaggtgctgaccagaagcgacaagaaccggggcaagagcgacaacgtgccctccgaagaggtcgtgaagaagatgaagaactactggcggcagctgctgaacgccaagctgattacccagagaaagttcgacaatctgaccaaggccgagagaggcggcctgagcgaactggataaggccggcttcatcaagagacagctggtggaaacccggcagatcacaaagcacgtggcacagatcctggactcccggatgaacactaagtacgacgagaatgacaagctgatccgggaagtgaaagtgatcaccctgaagtccaagctggtgtccgatttccggaaggatttccagttttacaaagtgcgcgagatcaacaactaccaccacgcccacgacgcctacctgaacgccgtcgtgggaaccgccctgatcaaaaagtaccctaagctggaaagcgagttcgtgtacggcgactacaaggtgtacgacgtgcggaagatgatcgccaagagcgagcaggaaatcggcaaggctaccgccaagtacttcttctacagcaacatcatgaactttttcaagaccgagattaccctggccaacggcgagatccggaagcggcctctgatcgagacaaacggcgaaaccggggagatcgtgtgggataagggccgggattttgccaccgtgcggaaagtgctgagcatgccccaagtgaatatcgtgaaaaagaccgaggtgcagacaggcggcttcagcaaagagtctatcctgcccaagaggaacagcgataagctgatcgccagaaagaaggactgggaccctaagaagtacggcggcttcgacagccccaccgtggcctattctgtgctggtggtggccaaagtggaaaagggcaagtccaagaaactgaagagtgtgaaagagctgctggggatcaccatcatggaaagaagcagcttcgagaagaatcccatcgactttctggaagccaagggctacaaagaagtgaaaaaggacctgatcatcaagctgcctaagtactccctgttcgagctggaaaacggccggaagagaatgctggcctctgccggcgaactgcagaagggaaacgaactggccctgccctccaaatatgtgaacttcctgtacctggccagccactatgagaagctgaagggctcccccgaggataatgagcagaaacagctgtttgtggaacagcacaagcactacctggacgagatcatcgagcagatcagcgagttctccaagagagtgatcctggccgacgctaatctggacaaagtgctgtccgcctacaacaagcaccgggataagcccatcagagagcaggccgagaatatcatccacctgtttaccctgaccaatctgggagcccctgccgccttcaagtactttgacaccaccatcgaccggaagaggtacaccagcaccaaagaggtgctggacgccaccctgatccaccagagcatcaccggcctgtacgagacacggatcgacctgtctcagctgggaggtgactctggaggatctagcggaggatcctctggcagcgagacaccaggaacaagcgagtcagcaacaccagagagcagtggcggcagcagcggcggcagcagcaccctaaatatagaagatgagtatcggctacatgagacctcaaaagagccagatgtttctctagggtccacatggctgtctgattttcctcaggcctgggcggaaaccgggggcatgggactggcagttcgccaagctcctctgatcatacctctgaaagcaacctctacccccgtgtccataaaacaataccccatgtcacaagaagccagactggggatcaagccccacatacagagactgttggaccagggaatactggtaccctgccagtccccctggaacacgcccctgctacccgttaagaaaccagggactaatgattataggcctgtccaggatctgagagaagtcaacaagcgggtggaagacatccaccccaccgtgcccaacccttacaacctcttgagcgggctcccaccgtcccaccagtggtacactgtgcttgatttaaaggatgcctttttctgcctgagactccaccccaccagtcagcctctcttcgcctttgagtggagagatccagagatgggaatctcaggacaattgacctggaccagactcccacagggtttcaaaaacagtcccaccctgtttaatgaggcactgcacagagacctagcagacttccggatccagcacccagacttgatcctgctacagtacgtggatgacttactgctggccgccacttctgagctagactgccaacaaggtactcgggccctgttacaaaccctagggaacctcgggtatcgggcctcggccaagaaagcccaaatttgccagaaacaggtcaagtatctggggtatcttctaaaagagggtcagagatggctgactgaggccagaaaagagactgtgatggggcagcctactccgaagacccctcgacaactaagggagttcctagggaaggcaggcttctgtcgcctcttcatccctgggtttgcagaaatggcagcccccctgtaccctctcaccaaaccggggactctgtttaattggggcccagaccaacaaaaggcctatcaagaaatcaagcaagctcttctaactgccccagccctggggttgccagatttgactaagccctttgaactctttgtcgacgagaagcagggctacgccaaaggtgtcctaacgcaaaaactgggaccttggcgtcggccggtggcctacctgtccaaaaagctagacccagtagcagctgggtggcccccttgcctacggatggtagcagccattgccgtactgacaaaggatgcaggcaagctaaccatgggacagccactagtcattctggccccccatgcagtagaggcactagtcaaacaaccccccgaccgctggctttccaacgcccggatgactcactatcaggccttgcttttggacacggaccgggtccagttcggaccggtggtagccctgaacccggctacgctgctcccactgcctgaggaagggctgcaacacaactgccttgatatcctggccgaagcccacggaacccgacccgacctaacggaccagccgctcccagacgccgaccacacctggtacacggatggaagcagtctcttacaagagggacagcgtaaggcgggagctgcggtgaccaccgagaccgaggtaatctgggctaaagccctgccagccgggacatccgctcagcgggctgaactgatagcactcacccaggccctaaagatggcagaaggtaagaagctaaatgtttatactgatagccgttatgcttttgctactgcccatatccatggagaaatatacagaaggcgtgggtggctcacatcagaaggcaaagagatcaaaaataaagacgagatcttggccctactaaaagccctctttctgcccaaaagacttagcataatccattgtccaggacatcaaaagggacacagcgccgaggctagaggcaaccggatggctgaccaagcggcccgaaaggcagccatcacagagactccagacacctctaccctcctcatagaaaattcatcaccctctggcggctcaaaaagaaccgccgacggcagcgaattcgagcccaagaagaagaggaaagtctaaccggtcatcatcaccatcaccattgagtttaaacccgctgatcagcctcgactgtgccttctagttgccagccatctgttgtttgcccctcccccgtgccttccttgaccctggaaggtgccactcccactgtcctttcctaataaaatgagaaaattgcatcgcattgtctgagtaggtgtcattctattctggggggtggggtggggcaggacagcaagggggaggattgggaagacaatagcaggcatgctggggatgcggtgggctctatggcttctgaggcggaaagaaccagctggggctcgataccgtcgacctctagctagagcttggcgtaatcatggtcatagctgtttcctgtgtgaaattgttatccgctcacaattccacacaacatacgagccggaagcataaagtgtaaagcctagggtgcctaatgagtgagctaactcacattaattgcgttgcgctcactgcccgctttccagtcgggaaacctgtcgtgccagctgcattaatgaatcggccaacgcgcggggagaggcggtttgcgtattgggcgctcttccgcttcctcgctcactgactcgctgcgctcggtcgttcggctgcggcgagcggtatcagctcactcaaaggcggtaatacggttatccacagaatcaggggataacgcaggaaagaacatgtgagcaaaaggccagcaaaaggccaggaaccgtaaaaaggccgcgttgctggcgtttttccataggctccgcccccctgacgagcatcacaaaaatcgacgctcaagtcagaggtggcgaaacccgacaggactataaagataccaggcgtttccccctggaagctccctcgtgcgctctcctgttccgaccctgccgcttaccggatacctgtccgcctttctcccttcgggaagcgtggcgctttctcatagctcacgctgtaggtatctcagttcggtgtaggtcgttcgctccaagctgggctgtgtgcacgaaccccccgttcagcccgaccgctgcgccttatccggtaactatcgtcttgagtccaacccggtaagacacgacttatcgccactggcagcagccactggtaacaggattagcagagcgaggtatgtaggcggtgctacagagttcttgaagtggtggcctaactacggctacactagaagaacagtatttggtatctgcgctctgctgaagccagttaccttcggaaaaagagttggtagctcttgatccggcaaacaaaccaccgctggtagcggtggtttttttgtttgcaagcagcagattacgcgcagaaaaaaaggatctcaagaagatcctttgatcttttctacggggtctgacgctcagtggaacgaaaactcacgttaagggattttggtcatgagattatcaaaaaggatcttcacctagatccttttaaattaaaaatgaagttttaaatcaatctaaagtatatatgagtaaacttggtctgacagttaccaatgcttaatcagtgaggcacctatctcagcgatctgtctatttcgttcatccatagttgcctgactccccgtcgtgtagataactacgatacgggagggcttaccatctggccccagtgctgcaatgataccgcgagacccacgctcaccggctccagatttatcagcaataaaccagccagccggaagggccgagcgcagaagtggtcctgcaactttatccgcctccatccagtctattaattgttgccgggaagctagagtaagtagttcgccagttaatagtttgcgcaacgttgttgccattgctacaggcatcgtggtgtcacgctcgtcgtttggtatggcttcattcagctccggttcccaacgatcaaggcgagttacatgatcccccatgttgtgcaaaaaagcggttagctccttcggtcctccgatcgttgtcagaagtaagttggccgcagtgttatcactcatggttatggcagcactgcataattctcttactgtcatgccatccgtaagatgcttttctgtgactggtgagtactcaaccaagtcattctgagaatagtgtatgcggcgaccgagttgctcttgcccggcgtcaatacgggataataccgcgccacatagcagaactttaaaagtgctcatcattggaaaacgttcttcggggcgaaaactctcaaggatcttaccgctgttgagatccagttcgatgtaacccactcgtgcacccaactgatcttcagcatcttttactttcaccagcgtttctgggtgagcaaaaacaggaaggcaaaatgccgcaaaaaagggaataagggcgacacggaaatgttgaatactcatactcttcctttttcaatattattgaagcatttatcagggttattgtctcatgagcggatacatatttgaatgtatttagaaaaataaacaaataggggttccgcgcacatttccccgaaaagtgccacctgacgtcgacggatcgggagatcgatctcccgatcccctagggtcgactctcagtacaatctgctctgatgccgcatagttaagccagtatctgctccctgcttgtgtgttggaggtcgctgagtagtgcgcgagcaaaatttaagctacaacaaggcaaggcttgaccgacaattgcatgaagaatctgcttagggttaggcgttttgcgctgcttcgcgatgtacgggccagatatacgcgttgacattgattattgactagttattaatagtaatcaattacggggtcattagttcatagcccatatatggagttccgcgttacataacttacggtaaatggcccgcctggctgaccgcccaacgacccccgcccattgacgtcaataatgacgtatgttcccatagtaacgccaatagggactttccattgacgtcaatgggtggagtatttacggtaaactgcccacttggcagtacatcaagtgtatcatatgccaagtacgccccctattgacgtcaatgacggtaaatggcccgcctggcattatgcccagtacatgaccttatgggactttcctacttggcagtacatctacgtattagtcatcgctattaccatggtgatgcggttttggcagtacatcaatgggcgtggatagcggtttgactcacggggatttccaagtctccaccccattgacgtcaatgggagtttgttttggcaccaaaatcaacgggactttccaaaatgtcgtaacaactccgccccattgacgcaaatgggcggtaggcgtgtacggtgggaggtctatataagcagagctggtttagtgaaccgtcagatccgctagagatccgcggccgctaatacgactcactatagggagagccgccacc

SEQ ID NO: 735 - DNA, 2305 bp, synthetic construct
  misc_feature 1..2305: note = Synthetic
  source 1..2305: mol_type = other DNA
gagggcctatttcccatgattccttcatatttgcatatacgatacaaggctgttagagagataattagaattaatttgactgtaaacacaaagatattagtacaaaatacgtgacgtagaaagtaataatttcttgggtagtttgcagttttaaaattatgttttaaaatggactatcatatgcttaccgtaacttgaaagtatttcgatttcttggctttatatatcttgtggaaaggacgaaacaccggcccagactgagcacgtgagttttagagctagaaatagcaagttaaaataaggctagtccgttatcaacttgaaaaagtgggaccgagtcggtcctctgccatcaaagcgtgctcagtctgtttttttaagcttgggccgctcgaggtacctctctacatatgacatgtgagcaaaaggccagcaaaaggccaggaaccgtaaaaaggccgcgttgctggcgtttttccataggctccgcccccctgacgagcatcacaaaaatcgacgctcaagtcagaggtggcgaaacccgacaggactataaagataccaggcgtttccccctggaagctccctcgtgcgctctcctgttccgaccctgccgcttaccggatacctgtccgcctttctcccttcgggaagcgtggcgctttctcatagctcacgctgtaggtatctcagttcggtgtaggtcgttcgctccaagctgggctgtgtgcacgaaccccccgttcagcccgaccgctgcgccttatccggtaactatcgtcttgagtccaacccggtaagacacgacttatcgccactggcagcagccactggtaacaggattagcagagcgaggtatgtaggcggtgctacagagttcttgaagtggtggcctaactacggctacactagaagaacagtatttggtatctgcgctctgctgaagccagttaccttcggaaaaagagttggtagctcttgatccggcaaacaaaccaccgctggtagcggtggtttttttgtttgcaagcagcagattacgcgcagaaaaaaaggatctcaagaagatcctttgatcttttctacggggtctgacgctcagtggaacgaaaactcacgttaagggattttggtcatgagattatcaaaaaggatcttcacctagatccttttaaattaaaaatgaagttttaaatcaatctaaagtatatatgagtaaacttggtctgacagttaccaatgcttaatcagtgaggcacctatctcagcgatctgtctatttcgttcatccatagttgcctgactccccgtcgtgtagataactacgatacgggagggcttaccatctggccccagtgctgcaatgataccgcgagacccacgctcaccggctccagatttatcagcaataaaccagccagccggaagggccgagcgcagaagtggtcctgcaactttatccgcctccatccagtctattaattgttgccgggaagctagagtaagtagttcgccagttaatagtttgcgcaacgttgttgccattgctacaggcatcgtggtgtcacgctcgtcgtttggtatggcttcattcagctccggttcccaacgatcaaggcgagttacatgatcccccatgttgtgcaaaaaagcggttagctccttcggtcctccgatcgttgtcagaagtaagttggccgcagtgttatcactcatggttatggcagcactgcataattctcttactgtcatgccatccgtaagatgcttttctgtgactggtgagtactcaaccaagtcattctgagaatagtgtatgcggcgaccgagttgctcttgcccggcgtcaatacgggataataccgcgccacatagcagaactttaaaagtgctcatcattggaaaacgttcttcggggcgaaaactctcaaggatcttaccgctgttgagatccagttcgatgtaacccactcgtgcacccaactgatcttcagcatcttttactttcaccagcgtttctgggtgagcaaaaacaggaaggcaaaatgccgcaaaaaagggaataagggcgacacggaaatgttgaatactcatactcttcctttttcaatattattgaagcatttatcagggttattgtctcatgagcggatacatatttgaatgtatttagaaaaataaacaaataggggttccgcgcacatttccccgaaaagtgccacctgacgtcgctagctgtacaaaaaagcaggctttaaaggaaccaattcagtcgactggatccggtaccaaggtcgggcaggaa

SEQ ID NO: 736 - DNA, 11591 bp, synthetic construct
  misc_feature 1..11591: note = Synthetic
  source 1..11591: mol_type = other DNA
gtcgacggatcgggagatctcccgatcccctatggtgcactctcagtacaatctgctctgatgccgcatagttaagccagtatctgctccctgcttgtgtgttggaggtcgctgagtagtgcgcgagcaaaatttaagctacaacaaggcaaggcttgaccgacaattgcatgaagaatctgcttagggttaggcgttttgcgctgcttcgcgatgtacgggccagatatacgcgttgacattgattattgactagttattaatagtaatcaattacggggtcattagttcatagcccatatatggagttccgcgttacataacttacggtaaatggcccgcctggctgaccgcccaacgacccccgcccattgacgtcaataatgacgtatgttcccatagtaacgccaatagggactttccattgacgtcaatgggtggagtatttacggtaaactgcccacttggcagtacatcaagtgtatcatatgccaagtacgccccctattgacgtcaatgacggtaaatggcccgcctggcattatgcccagtacatgaccttatgggactttcctacttggcagtacatctacgtattagtcatcgctattaccatggtgatgcggttttggcagtacatcaatgggcgtggatagcggtttgactcacggggatttccaagtctccaccccattgacgtcaatgggagtttgttttggcaccaaaatcaacgggactttccaaaatgtcgtaacaactccgccccattgacgcaaatgggcggtaggcgtgtacggtgggaggtctatataagcagcgcgttttgcctgtactgggtctctctggttagaccagatctgagcctgggagctctctggctaactagggaacccactgcttaagcctcaataaagcttgccttgagtgcttcaagtagtgtgtgcccgtctgttgtgtgactctggtaactagagatccctcagacccttttagtcagtgtggaaaatctctagcagtggcgcccgaacagggacttgaaagcgaaagggaaaccagaggagctctctcgacgcaggactcggcttgctgaagcgcgcacggcaagaggcgaggggcggcgactggtgagtacgccaaaaattttgactagcggaggctagaaggagagagatgggtgcgagagcgtcagtattaagcgggggagaattagatcgcgatgggaaaaaattcggttaaggccagggggaaagaaaaaatataaattaaaacatatagtatgggcaagcagggagctagaacgattcgcagttaatcctggcctgttagaaacatcagaaggctgtagacaaatactgggacagctacaaccatcccttcagacaggatcagaagaacttagatcattatataatacagtagcaaccctctattgtgtgcatcaaaggatagagataaaagacaccaaggaagctttagacaagatagaggaagagcaaaacaaaagtaagaccaccgcacagcaagcggccgctgatcttcagacctggaggaggagatatgagggacaattggagaagtgaattatataaatataaagtagtaaaaattgaaccattaggagtagcacccaccaaggcaaagagaagagtggtgcagagagaaaaaagagcagtgggaataggagctttgttccttgggttcttgggagcagcaggaagcactatgggcgcagcgtcaatgacgctgacggtacaggccagacaattattgtctggtatagtgcagcagcagaacaatttgctgagggctattgaggcgcaacagcatctgttgcaactcacagtctggggcatcaagcagctccaggcaagaatcctggctgtggaaagatacctaaaggatcaacagctcctggggatttggggttgctctggaaaactcatttgcaccactgctgtgccttggaatgctagttggagtaataaatctctggaacagatttggaatcacacgacctggatggagtgggacagagaaattaacaattacacaagcttaatacactccttaattgaagaatcgcaaaaccagcaagaaaagaatgaacaagaattattggaattagataaatgggcaagtttgtggaattggtttaacataacaaattggctgtggtatataaaattattcataatgatagtaggaggcttggtaggtttaagaatagtttttgctgtactttctatagtgaatagagttaggcagggatattcaccattatcgtttcagacccacctcccaaccccgaggggacccgacaggcccgaaggaatagaagaagaaggtggagagagagacagagacagatccattcgattagtgaacggatcggcactgcgtgcgccaattctgcagacaaatggcagtattcatccacaattttaaaagaaaaggggggattggggggtacagtgcaggggaaagaatagtagacataatagcaacagacatacaaactaaagaattacaaaaacaaattacaaaaattcaaaattttcgggtttattacagggacagcagagatccagtttggttaattaaggtaccaaggtcgggcaggaagagggcctatttcccatgattccttcatatttgcatatacgatacaaggctgttagagagataattagaattaatttgactgtaaacacaaagatattagtacaaaatacgtgacgtagaaagtaataatttcttgggtagtttgcagttttaaaattatgttttaaaatggactatcatatgcttaccgtaacttgaaagtatttcgatttcttggctttatatatcttgtggaaaggacgaaacaccgcgggctggagctgttcgcgcgttttagagctagaaatagcaagttaaaataaggctagtccgttatcaacttgaaaaagtggcaccgagtcggtgcaagatgcaagcgcgaacagctccagtttttttgaattcagtgcaagtgggttttaggaccaggatgaggcggggtgggggtgcctacctgacgaccgaccccgacccactggacaagcacccaacccccattccccaaattgcgcatcccctatcagagagggggaggggaaacaggatgcggcgaggcgcgtgcgcactgccagcttcagcaccgcggacagtgccttcgcccccgcctggcggcgcgcgccaccgccgcctcagcactgaaggcgcgctgacgtcactcgccggtcccccgcaaactccccttcccggccaccttggtcgcgtccgcgccgccgccggcccagccggaccgcaccacgcgaggcgcgagataggggggcacgggcgcgaccatctgcgctgcggcgccggcgactcagcgctgcctcagtctgcggtgggcagcggaggagtcgtgtcgtgcctgagagcgcagtcgagaatctagagcgctgccaccatgaaacggacagccgacggaagcgagttcgagtcaccaaagaagaagcggaaagtcgacaagaagtacagcatcggcctggacatcggcaccaactctgtgggctgggccgtgatcaccgacgagtacaaggtgcccagcaagaaattcaaggtgctgggcaacaccgaccggcacagcatcaagaagaacctgatcggagccctgctgttcgacagcggcgaaacagccgaggccacccggctgaagagaaccgccagaagaagatacaccagacggaagaaccggatctgctatctgcaagagatcttcagcaacgagatggccaaggtggacgacagcttcttccacagactggaagagtccttcctggtggaagaggataagaagcacgagcggcaccccatcttcggcaacatcgtggacgaggtggcctaccacgagaagtaccccaccatctaccacctgagaaagaaactggtggacagcaccgacaaggccgacctgcggctgatctatctggccctggcccacatgatcaagttccggggccacttcctgatcgagggcgacctgaaccccgacaacagcgacgtggacaagctgttcatccagctggtgcagacctacaaccagctgttcgaggaaaaccccatcaacgccagcggcgtggacgccaaggccatcctgtctgccagactgagcaagagcagacggctggaaaatctgatcgcccagctgcccggcgagaagaagaatggcctgttcggaaacctgattgccctgagcctgggcctgacccccaacttcaagagcaacttcgacctggccgaggatgccaaactgcagctgagcaaggacacctacgacgacgacctggacaacctgctggcccagatcggcgaccagtacgccgacctgtttctggccgccaagaacctgtccgacgccatcctgctgagcgacatcctgagagtgaacaccgagatcaccaaggcccccctgagcgcctctatgatcaagagatacgacgagcaccaccaggacctgaccctgctgaaagctctcgtgcggcagcagctgcctgagaagtacaaagagattttcttcgaccagagcaagaacggctacgccggctacattgacggcggagccagccaggaagagttctacaagttcatcaagcccatcctggaaaagatggacggcaccgaggaactgctcgtgaagctgaacagagaggacctgctgcggaagcagcggaccttcgacaacggcagcatcccccaccagatccacctgggagagctgcacgccattctgcggcggcaggaagatttttacccattcctgaaggacaaccgggaaaagatcgagaagatcctgaccttccgcatcccctactacgtgggccctctggccaggggaaacagcagattcgcctggatgaccagaaagagcgaggaaaccatcaccccctggaacttcgaggaagtggtggacaagggcgcttccgcccagagcttcatcgagcggatgaccaacttcgataagaacctgcccaacgagaaggtgctgcccaagcacagcctgctgtacgagtacttcaccgtgtataacgagctgaccaaagtgaaatacgtgaccgagggaatgagaaagcccgccttcctgagcggcgagcagaaaaaggccatcgtggacctgctgttcaagaccaaccggaaagtgaccgtgaagcagctgaaagaggactacttcaagaaaatcgagtgcctgtcctacgagacagagatcctgacagtggagtatggcctgctgccaatcggcaagatcgtggagaagaggatcgagtgtaccgtgtactctgtggataacaatggcaacatctatacacagcccgtggcacagtggcacgataggggagagcaggaggtgttcgagtattgcctggaggacggcagcctgatcagggcaaccaaggaccacaagttcatgacagtggatggccagatgctgcccatcgacgagattttcgagcgggagctggacctgatgagagtggataacctgcctaatagcggaggcagtaaaagaacagcagacgggagtgagtttgagcccaagaaaaagagaaaggtgggatccggcgcaacaaacttctctctgctgaaacaagccggagatgtcgaagagaatcctggaccggtgagcaagggcgaggagctgttcaccggggtggtgcccatcctggtcgagctggacggcgacgtaaacggccacaagttcagcgtgtccggcgagggcgagggcgatgccacctacggcaagctgaccctgaagttcatctgcaccaccggcaagctgcccgtgccctggcccaccctcgtgaccaccctgacctacggcgtgcagtgcttcagccgctaccccgaccacatgaagcagcacgacttcttcaagtccgccatgcccgaaggctacgtccaggagcgcaccatcttcttcaaggacgacggcaactacaagacccgcgccgaggtgaagttcgagggcgacaccctggtgaaccgcatcgagctgaagggcatcgacttcaaggaggacggcaacatcctggggcacaagctggagtacaactacaacagccacaacgtctatatcatggccgacaagcagaagaacggcatcaaggtgaacttcaagatccgccacaacatcgaggacggcagcgtgcagctcgccgaccactaccagcagaacacccccatcggcgacggccccgtgctgctgcccgacaaccactacctgagcacccagtccgccctgagcaaagaccccaacgagaagcgcgatcacatggtcctgctggagttcgtgaccgccgccgggatcactctcggcatggacgagctgtacaagtccggactcagatctcgagaggaggaggaggagacagacagcaggatgccccacctcgacagccccggcagctcccagccgagacgctccttcctctcaagggtgatcagggcagcgctaccgttgcagctgcttctgctgctgctgctgctcctggcctgcctgctacctgcctctgaagatgactacagctgcacccaggccaacaactttgcccgatccttctaccccatgctgcggtacaccaacgggccacctcccacctaaacgcgttaagtcgacaatcaacctctggattacaaaatttgtgaaagattgactggtattcttaactatgttgctccttttacgctatgtggatacgctgctttaatgcctttgtatcatgctattgcttcccgtatggctttcattttctcctccttgtataaatcctggttgctgtctctttatgaggagttgtggcccgttgtcaggcaacgtggcgtggtgtgcactgtgtttgctgacgcaacccccactggttggggcattgccaccacctgtcagctcctttccgggactttcgctttccccctccctattgccacggcggaactcatcgccgcctgccttgcccgctgctggacaggggctcggctgttgggcactgacaattccgtggtgttgtcggggaaatcatcgtcctttccttggctgctcgcctgtgttgccacctggattctgcgcgggacgtccttctgctacgtcccttcggccctcaatccagcggaccttccttcccgcggcctgctgccggctctgcggcctcttccgcgtcttcgccttcgccctcagacgagtcggatctccctttgggccgcctccccgcgtcgactttaagaccaatgacttacaaggcagctgtagatcttagccactttttaaaagaaaaggggggactggaagggctaattcactcccaacgaagacaagatctgctttttgcttgtactgggtctctctggttagaccagatctgagcctgggagctctctggctaactagggaacccactgcttaagcctcaataaagcttgccttgagtgcttcaagtagtgtgtgcccgtctgttgtgtgactctggtaactagagatccctcagacccttttagtcagtgtggaaaatctctagcagggcccgtttaaacccgctgatcagcctcgactgtgccttctagttgccagccatctgttgtttgcccctcccccgtgccttccttgaccctggaaggtgccactcccactgtcctttcctaataaaatgaggaaattgcatcgcattgtctgagtaggtgtcattctattctggggggtggggtggggcaggacagcaagggggaggattgggaagacaatagcaggcatgctggggatgcggtgggctctatggcttctgaggcggaaagaaccagctggggctctagggggtatccccacgcgccctgtagcggcgcattaagcgcggcgggtgtggtggttacgcgcagcgtgaccgctacacttgccagcgccctagcgcccgctcctttcgctttcttcccttcctttctcgccacgttcgccggctttccccgtcaagctctaaatcgggggctccctttagggttccgatttagtgctttacggcacctcgaccccaaaaaacttgattagggtgatggttcacgtagtgggccatcgccctgatagacggtttttcgccctttgacgttggagtccacgttctttaatagtggactcttgttccaaactggaacaacactcaaccctatctcggtctattcttttgatttataagggattttgccgatttcggcctattggttaaaaaatgagctgatttaacaaaaatttaacgcgaattaattctgtggaatgtgtgtcagttagggtgtggaaagtccccaggctccccagcaggcagaagtatgcaaagcatgcatctcaattagtcagcaaccaggtgtggaaagtccccaggctccccagcaggcagaagtatgcaaagcatgcatctcaattagtcagcaaccatagtcccgcccctaactccgcccatcccgcccctaactccgcccagttccgcccattctccgccccatggctgactaattttttttatttatgcagaggccgaggccgcctctgcctctgagctattccagaagtagtgaggaggcttttttggaggcctaggcttttgcaaaaagctcccgggagcttgtatatccattttcggatctgatcagcacgtgttgacaattaatcatcggcatagtatatcggcatagtataatacgacaaggtgaggaactaaaccatggccaagttgaccagtgccgttccggtgctcaccgcgcgcgacgtcgccggagcggtcgagttctggaccgaccggctcgggttctcccgggacttcgtggaggacgacttcgccggtgtggtccgggacgacgtgaccctgttcatcagcgcggtccaggaccaggtggtgccggacaacaccctggcctgggtgtgggtgcgcggcctggacgagctgtacgccgagtggtcggaggtcgtgtccacgaacttccgggacgcctccgggccggccatgaccgagatcggcgagcagccgtgggggcgggagttcgccctgcgcgacccggccggcaactgcgtgcacttcgtggccgaggagcaggactgacacgtgctacgagatttcgattccaccgccgccttctatgaaaggttgggcttcggaatcgttttccgggacgccggctggatgatcctccagcgcggggatctcatgctggagttcttcgcccaccccaacttgtttattgcagcttataatggttacaaataaagcaatagcatcacaaatttcacaaataaagcatttttttcactgcattctagttgtggtttgtccaaactcatcaatgtatcttatcatgtctgtataccgtcgacctctagctagagcttggcgtaatcatggtcatagctgtttcctgtgtgaaattgttatccgctcacaattccacacaacatacgagccggaagcataaagtgtaaagcctggggtgcctaatgagtgagctaactcacattaattgcgttgcgctcactgcccgctttccagtcgggaaacctgtcgtgccagctgcattaatgaatcggccaacgcgcggggagaggcggtttgcgtattgggcgctcttccgcttcctcgctcactgactcgctgcgctcggtcgttcggctgcggcgagcggtatcagctcactcaaaggcggtaatacggttatccacagaatcaggggataacgcaggaaagaacatgtgagcaaaaggccagcaaaaggccaggaaccgtaaaaaggccgcgttgctggcgtttttccataggctccgcccccctgacgagcatcacaaaaatcgacgctcaagtcagaggtggcgaaacccgacaggactataaagataccaggcgtttccccctggaagctccctcgtgcgctctcctgttccgaccctgccgcttaccggatacctgtccgcctttctcccttcgggaagcgtggcgctttctcatagctcacgctgtaggtatctcagttcggtgtaggtcgttcgctccaagctgggctgtgtgcacgaaccccccgttcagcccgaccgctgcgccttatccggtaactatcgtcttgagtccaacccggtaagacacgacttatcgccactggcagcagccactggtaacaggattagcagagcgaggtatgtaggcggtgctacagagttcttgaagtggtggcctaactacggctacactagaagaacagtatttggtatctgcgctctgctgaagccagttaccttcggaaaaagagttggtagctcttgatccggcaaacaaaccaccgctggtagcggtggtttttttgtttgcaagcagcagattacgcgcagaaaaaaaggatctcaagaagatcctttgatcttttctacggggtctgacgctcagtggaacgaaaactcacgttaagggattttggtcatgagattatcaaaaaggatcttcacctagatccttttaaattaaaaatgaagttttaaatcaatctaaagtatatatgagtaaacttggtctgacagttaccaatgcttaatcagtgaggcacctatctcagcgatctgtctatttcgttcatccatagttgcctgactccccgtcgtgtagataactacgatacgggagggcttaccatctggccccagtgctgcaatgataccgcgagacccacgctcaccggctccagatttatcagcaataaaccagccagccggaagggccgagcgcagaagtggtcctgcaactttatccgcctccatccagtctattaattgttgccgggaagctagagtaagtagttcgccagttaatagtttgcgcaacgttgttgccattgctacaggcatcgtggtgtcacgctcgtcgtttggtatggcttcattcagctccggttcccaacgatcaaggcgagttacatgatcccccatgttgtgcaaaaaagcggttagctccttcggtcctccgatcgttgtcagaagtaagttggccgcagtgttatcactcatggttatggcagcactgcataattctcttactgtcatgccatccgtaagatgcttttctgtgactggtgagtactcaaccaagtcattctgagaatagtgtatgcggcgaccgagttgctcttgcccggcgtcaatacgggataataccgcgccacatagcagaactttaaaagtgctcatcattggaaaacgttcttcggggcgaaaactctcaaggatcttaccgctgttgagatccagttcgatgtaacccactcgtgcacccaactgatcttcagcatcttttactttcaccagcgtttctgggtgagcaaaaacaggaaggcaaaatgccgcaaaaaagggaataagggcgacacggaaatgttgaatactcatactcttcctttttcaatattattgaagcatttatcagggttattgtctcatgagcggatacatatttgaatgtatttagaaaaataaacaaataggggttccgcgcacatttccccgaaaagtgccacctgac

SEQ ID NO: 737 - skipped

SEQ ID NO: 738 - DNA, 8323 bp, synthetic construct
  misc_feature 1..8323: note = Synthetic
  source 1..8323: mol_type = other DNA
taacaaattggctgtggtatataaaattattcataatgatagtaggaggcttggtaggtttaagaatagtttttgctgtactttctatagtgaatagagttaggcagggatattcaccattatcgtttcagacccacctcccaaccccgaggggacccagagagggcctatttcccatgattccttcatatttgcatatacgatacaaggctgttagagagataattagaattaatttgactgtaaacacaaagatattagtacaaaatacgtgacgtagaaagtaataatttcttgggtagtttgcagttttaaaattatgttttaaaatggactatcatatgcttaccgtaacttgaaagtatttcgatttcttggctttatatatcttgtggaaaggacgaaacaccgccgcgcgcgcgaaaaagccggttttagagctagaaatagcaagttaaaataaggctagtccgttatcaacttgaaaaagtggcaccgagtcggtgcttttttaagcttggcgtaactagatcttgagacaaatggcagtattcatccacaattttaaaagaaaaggggggattggggggtacagtgcaggggaaagaatagtagacataatagcaacagacatacaaactaaagaattacaaaaacaaattacaaaaattcaaaattttcgggtttattacagggacagcagagatccactttggcgccggctcgagggggcccgggtgcaaagatggataaagttttaaacagagaggaatctttgcagctaatggaccttctaggtcttgaaaggagtgggaattggctccggtgcccgtcagtgggcagagcgcacatcgcccacagtccccgagaagttggggggaggggtcggcaattgatccggtgcctagagaaggtggcgcggggtaaactgggaaagtgatgtcgtgtactggctccgcctttttcccgagggtgggggagaaccgtatataagtgcagtagtcgccgtgaacgttctttttcgcaacgggtttgccgccagaacacaggtaagtgccgtgtgtggttcccgcgggcctggcctctttacgggttatggcccttgcgtgccttgaattacttccacctggctgcagtacgtgattcttgatcccgagcttcgggttggaagtgggtgggagagttcgaggccttgcgcttaaggagccccttcgcctcgtgcttgagttgaggcctggcctgggcgctggggccgccgcgtgcgaatctggtggcaccttcgcgcctgtctcgctgctttcgataagtctctagccatttaaaatttttgatgacctgctgcgacgctttttttctggcaagatagtcttgtaaatgcgggccaagatctgcacactggtatttcggtttttggggccgcgggcggcgacggggcccgtgcgtcccagcgcacatgttcggcgaggcggggcctgcgagcgcggccaccgagaatcggacgggggtagtctcaagctggccggcctgctctggtgcctggcctcgcgccgccgtgtatcgccccgccctgggcggcaaggctggcccggtcggcaccagttgcgtgagcggaaagatggccgcttcccggccctgctgcagggagctcaaaatggaggacgcggcgctcgggagagcgggcgggtgagtcacccacacaaaggaaaagggcctttccgtcctcagccgtcgcttcatgtgactccacggagtaccgggcgccgtccaggcacctcgattagttctcgagcttttggagtacgtcgtctttaggttggggggaggggttttatgcgatggagtttccccacactgagtgggtggagactgaagttaggccagcttggcacttgatgtaattctccttggaatttgccctttttgagtttggatcttggttcattctcaagcctcagacagtggttcaaagtttttttcttccatttcaggtgtcgtgacgtacggccaccatgaccgagtacaagcccacggtgcgcctcgccacccgcgacgacgtccccagggccgtacgcaccctcgccgccgcgttcgccgactaccccgccacgcgccacaccgtcgatccggaccgccacatcgagcgggtcaccgagctgcaagaactcttcctcacgcgcgtcgggctcgacatcggcaaggtgtgggtcgcggacgacggcgccgccgtggcggtctggaccacgccggagagcgtcgaagcgggggcggtgttcgccgagatcggcccgcgcatggccgagttgagcggttcccggctggccgcgcagcaacagatggaaggcctcctggcgccgcaccggcccaaggagcccgcgtggttcctggccaccgtcggagtctcgcccgaccaccagggcaagggtctgggcagcgccgtcgtgctccccggagtggaggcggccgagcgcgccggggtgcccgccttcctggagacctccgcgccccgcaacctccccttctacgagcggctcggcttcaccgtcaccgccgacgtcgaggtgcccgaaggaccgcgcacctggtgcatgacccgcaagcccggtgcctgaacgcgttaagtcgacaatcaacctctggattacaaaatttgtgaaagattgactggtattcttaactatgttgctccttttacgctatgtggatacgctgctttaatgcctttgtatcatgctattgcttcccgtatggctttcattttctcctccttgtataaatcctggttgctgtctctttatgaggagttgtggcccgttgtcaggcaacgtggcgtggtgtgcactgtgtttgctgacgcaacccccactggttggggcattgccaccacctgtcagctcctttccgggactttcgctttccccctccctattgccacggcggaactcatcgccgcctgccttgcccgctgctggacaggggctcggctgttgggcactgacaattccgtggtgttgtcggggaaatcatcgtcctttccttggctgctcgcctgtgttgccacctggattctgcgcgggacgtccttctgctacgtcccttcggccctcaatccagcggaccttccttcccgcggcctgctgccggctctgcggcctcttccgcgtcttcgccttcgccctcagacgagtcggatctccctttgggccgcctccccgcgtcgactttaagaccaatgacttacaaggcagctgtagatcttagccactttttaaaagaaaaggggggactggaagggctaattcactcccaacgaagacaagatctgctttttgcttgtactgggtctctctggttagaccagatctgagcctgggagctctctggctaactagggaacccactgcttaagcctcaataaagcttgccttgagtgcttcaagtagtgtgtgcccgtctgttgtgtgactctggtaactagagatccctcagacccttttagtcagtgtggaaaatctctagcagtacgtatagtagttcatgtcatcttattattcagtatttataacttgcaaagaaatgaatatcagagagtgagaggaacttgtttattgcagcttataatggttacaaataaagcaatagcatcacaaatttcacaaataaagcatttttttcactgcattctagttgtggtttgtccaaactcatcaatgtatcttatcatgtctggctctagctatcccgcccctaactccgcccatcccgcccctaactccgcccagttccgcccattctccgccccatggctgactaattttttttatttatgcagaggccgaggccgcctcggcctctgagctattccagaagtagtgaggaggcttttttggaggcctagggacgtacccaattcgccctatagtgagtcgtattacgcgcgctcactggccgtcgttttacaacgtcgtgactgggaaaaccctggcgttacccaacttaatcgccttgcagcacatccccctttcgccagctggcgtaatagcgaagaggcccgcaccgatcgcccttcccaacagttgcgcagcctgaatggcgaatgggacgcgccctgtagcggcgcattaagcgcggcgggtgtggtggttacgcgcagcgtgaccgctacacttgccagcgccctagcgcccgctcctttcgctttcttcccttcctttctcgccacgttcgccggctttccccgtcaagctctaaatcgggggctccctttagggttccgatttagtgctttacggcacctcgaccccaaaaaacttgattagggtgatggttcacgtagtgggccatcgccctgatagacggtttttcgccctttgacgttggagtccacgttctttaatagtggactcttgttccaaactggaacaacactcaaccctatctcggtctattcttttgatttataagggattttgccgatttcggcctattggttaaaaaatgagctgatttaacaaaaatttaacgcgaattttaacaaaatattaacgcttacaatttaggtggcacttttcggggaaatgtgcgcggaacccctatttgtttatttttctaaatacattcaaatatgtatccgctcatgagacaataaccctgataaatgcttcaataatattgaaaaaggaagagtatgagtattcaacatttccgtgtcgcccttattcccttttttgcggcattttgccttcctgtttttgctcacccagaaacgctggtgaaagtaaaagatgctgaagatcagttgggtgcacgagtgggttacatcgaactggatctcaacagcggtaagatccttgagagttttcgccccgaagaacgttttccaatgatgagcacttttaaagttctgctatgtggcgcggtattatcccgtattgacgccgggcaagagcaactcggtcgccgcatacactattctcagaatgacttggttgagtactcaccagtcacagaaaagcatcttacggatggcatgacagtaagagaattatgcagtgctgccataaccatgagtgataacactgcggccaacttacttctgacaacgatcggaggaccgaaggagctaaccgcttttttgcacaacatgggggatcatgtaactcgccttgatcgttgggaaccggagctgaatgaagccataccaaacgacgagcgtgacaccacgatgcctgtagcaatggcaacaacgttgcgcaaactattaactggcgaactacttactctagcttcccggcaacaattaatagactggatggaggcggataaagttgcaggaccacttctgcgctcggcccttccggctggctggtttattgctgataaatctggagccggtgagcgtgggtctcgcggtatcattgcagcactggggccagatggtaagccctcccgtatcgtagttatctacacgacggggagtcaggcaactatggatgaacgaaatagacagatcgctgagataggtgcctcactgattaagcattggtaactgtcagaccaagtttactcatatatactttagattgatttaaaacttcatttttaatttaaaaggatctaggtgaagatcctttttgataatctcatgaccaaaatcccttaacgtgagttttcgttccactgagcgtcagaccccgtagaaaagatcaaaggatcttcttgagatcctttttttctgcgcgtaatctgctgcttgcaaacaaaaaaaccaccgctaccagcggtggtttgtttgccggatcaagagctaccaactctttttccgaaggtaactggcttcagcagagcgcagataccaaatactgttcttctagtgtagccgtagttaggccaccacttcaagaactctgtagcaccgcctacatacctcgctctgctaatcctgttaccagtggctgctgccagtggcgataagtcgtgtcttaccgggttggactcaagacgatagttaccggataaggcgcagcggtcgggctgaacggggggttcgtgcacacagcccagcttggagcgaacgacctacaccgaactgagatacctacagcgtgagctatgagaaagcgccacgcttcccgaagggagaaaggcggacaggtatccggtaagcggcagggtcggaacaggagagcgcacgagggagcttccagggggaaacgcctggtatctttatagtcctgtcgggtttcgccacctctgacttgagcgtcgatttttgtgatgctcgtcaggggggcggagcctatggaaaaacgccagcaacgcggcctttttacggttcctggccttttgctggccttttgctcacatgttctttcctgcgttatcccctgattctgtggataaccgtattaccgcctttgagtgagctgataccgctcgccgcagccgaacgaccgagcgcagcgagtcagtgagcgaggaagcggaagagcgcccaatacgcaaaccgcctctccccgcgcgttggccgattcattaatgcagctggcacgacaggtttcccgactggaaagcgggcagtgagcgcaacgcaattaatgtgagttagctcactcattaggcaccccaggctttacactttatgcttccggctcgtatgttgtgtggaattgtgagcggataacaatttcacacaggaaacagctatgaccatgattacgccaagcgcgcaattaaccctcactaaagggaacaaaagctggagctgcaagcttaatgtagtcttatgcaatactcttgtagtcttgcaacatggtaacgatgagttagcaacatgccttacaaggagagaaaaagcaccgtgcatgccgattggtggaagtaaggtggtacgatcgtgccttattaggaaggcaacagacgggtctgacatggattggacgaaccactgaattgccgcattgcagagatattgtatttaagtgcctagctcgatacataaacgggtctctctggttagaccagatctgagcctgggagctctctggctaactagggaacccactgcttaagcctcaataaagcttgccttgagtgcttcaagtagtgtgtgcccgtctgttgtgtgactctggtaactagagatccctcagacccttttagtcagtgtggaaaatctctagcagtggcgcccgaacagggacttgaaagcgaaagggaaaccagaggagctctctcgacgcaggactcggcttgctgaagcgcgcacggcaagaggcgaggggcggcgactggtgagtacgccaaaaattttgactagcggaggctagaaggagagagatgggtgcgagagcgtcagtattaagcgggggagaattagatcgcgatgggaaaaaattcggttaaggccagggggaaagaaaaaatataaattaaaacatatagtatgggcaagcagggagctagaacgattcgcagttaatcctggcctgttagaaacatcagaaggctgtagacaaatactgggacagctacaaccatcccttcagacaggatcagaagaacttagatcattatataatacagtagcaaccctctattgtgtgcatcaaaggatagagataaaagacaccaaggaagctttagacaagatagaggaagagcaaaacaaaagtaagaccaccgcacagcaagcggccgctgatcttcagacctggaggaggagatatgagggacaattggagaagtgaattatataaatataaagtagtaaaaattgaaccattaggagtagcacccaccaaggcaaagagaagagtggtgcagagagaaaaaagagcagtgggaataggagctttgttccttgggttcttgggagcagcaggaagcactatgggcgcagcgtcaatgacgctgacggtacaggccagacaattattgtctggtatagtgcagcagcagaacaatttgctgagggctattgaggcgcaacagcatctgttgcaactcacagtctggggcatcaagcagctccaggcaagaatcctggctgtggaaagatacctaaaggatcaacagctcctggggatttggggttgctctggaaaactcatttgcaccactgctgtgccttggaatgctagttggagtaataaatctctggaacagatttggaatcacacgacctggatggagtgggacagagaaattaacaattacacaagcttaatacactccttaattgaagaatcgcaaaaccagcaagaaaagaatgaacaagaattattggaattagataaatgggcaagtttgtggaattggtttaaca

SEQ ID NO: 739 - protein, 677 aa, unidentified; identical to SEQ ID NO: 89
  REGION 1..677: note = moloney murine leukemia virus

SEQ ID NO: 740 - protein, 677 aa, synthetic construct; identical to SEQ ID NO: 108
  REGION 1..677: note = Synthetic

SEQ ID NO: 741 - protein, 677 aa, synthetic construct; identical to SEQ ID NO: 122
  REGION 1..677: note = Synthetic

SEQ ID NO: 742 - protein, 677 aa, synthetic construct
  REGION 1..677: note = Synthetic
TLNIEDEYRLHETSKEPDVSLGSTWLSDFPQAWAETGGMGLAVRQAPLIIPLKATSTPVSIKQYPMSQEARLGIKPHIQRLLDQGILVPCQSPWNTPLLPVKLPGTNDYSPVQDLREVNKRVEDIHPTVPNPYNLLSGLPPSHQWYTVLDLKDAFFCLRLHPTSQPLFAFEWRDPEMGISGQLTWTRLPQGFKNSPTLFNEALHRDLADFRIQHPDLILLQYVDDLLLAATSELDCQQGTRALLQTLGNLGYRASAKKAQICQKQVKYLGYLLKEGQRWLTEARKETVMGQPTPKTPRQLREFLGTAGFCRLWIPGFAEMAAPLYPLTKPGTLFNWGPDQQKAYQEIKQALLTAPALGLPDLTKPFELFVDEKQGYAKGVLTQKLGPWRRPVAYLSKKLDPVAAGWPPCLRMVAAIAVLTKDAGKLTMGQPLVILAPHAVEALVKQPPDRWLSNARMTHYQALLLDTDRVQFGPVVALNPATLLPLPEEGLQHNCLDILAEAHGTRPDLTDQPLPDADHTWYTDGSSLLQEGQRKAGAAVTTETEVIWAKALPAGTSAQRAELIALTQALKMAEGKKLNVYTDSRYAFATAHIHGEIYRRRGWLTSEGKEIKNKDEILALLKALFLPKRLSIIHCPGHQKGHSAEARGNRMADQAARKAAITETPDTSTLLIENSSP

SEQ ID NO: 743-762 - skipped (20 entries)

SEQ ID NO: 763 - DNA, 33 bp, synthetic construct
  misc_feature 1..33: note = Synthetic
  source 1..33: mol_type = other DNA
gccaacatgaggatcacccatgtctgcagggcc

SEQ ID NO: 764 - protein, 131 aa, synthetic construct
  REGION 1..131: note = Synthetic
GSASNFTQFVLVDNGGTGDVTVAPSNFANGVAEWISSNSRSQAYKVTCSVRQSSAQNRKYTIKVEVPKVATQTVGGEELPVAGWRSYLNMELTIPIFATNSDCELIVKAMQGLLKDGNPIPSAIAANSGIY

SEQ ID NO: 765 - protein, 1943 aa, synthetic construct
  REGION 1..1943: note = Synthetic
MKRTADGSEFESPKKKRKVDKKYSIGLDIGTNSVGWAVITDEYKVPSKKFKVLGNTDRHSIKKNLIGALLFDSGETAEATRLKRTARRRYTRRKNRICYLQEIFSNEMAKVDDSFFHRLEESFLVEEDKKHERHPIFGNIVDEVAYHEKYPTIYHLRKKLVDSTDKADLRLIYLALAHMIKFRGHFLIEGDLNPDNSDVDKLFIQLVQTYNQLFEENPINASGVDAKAILSARLSKSRRLENLIAQLPGEKKNGLFGNLIALSLGLTPNFKSNFDLAEDAKLQLSKDTYDDDLDNLLAQIGDQYADLFLAAKNLSDAILLSDILRVNTEITKAPLSASMIKRYDEHHQDLTLLKALVRQQLPEKYKEIFFDQSKNGYAGYIDGGASQEEFYKFIKPILEKMDGTEELLVKLNREDLLRKQRTFDNGSIPHQIHLGELHAILRRQEDFYPFLKDNREKIEKILTFRIPYYVGPLARGNSRFAWMTRKSEETITPWNFEEVVDKGASAQSFIERMTNFDKNLPNEKVLPKHSLLYEYFTVYNELTKVKYVTEGMRKPAFLSGEQKKAIVDLLFKTNRKVTVKQLKEDYFKKIECFDSVEISGVEDRFNASLGTYHDLLKIIKDKDFLDNEENEDILEDIVLTLTLFEDREMIEERLKTYAHLFDDKVMKQLKRRRYTGWGRLSRKLINGIRDKQSGKTILDFLKSDGFANRNFMQLIHDDSLTFKEDIQKAQVSGQGDSLHEHIANLAGSPAIKKGILQTVKVVDELVKVMGRHKPENIVIEMARENQTTQKGQKNSRERMKRIEEGIKELGSQILKEHPVENTQLQNEKLYLYYLQNGRDMYVDQELDINRLSDYDVDAIVPQSFLKDDSIDNKVLTRSDKNRGKSDNVPSEEVVKKMKNYWRQLLNAKLITQRKFDNLTKAERGGLSELDKAGFIKRQLVETRQITKHVAQILDSRMNTKYDENDKLIREVKVITLKSKLVSDFRKDFQFYKVREINNYHHAHDAYLNAVVGTALIKKYPKLESEFVYGDYKVYDVRKMIAKSEQEIGKATAKYFFYSNIMNFFKTEITLANGEIRKRPLIETNGETGEIVWDKGRDFATVRKVLSMPQVNIVKKTEVQTGGFSKESILPKRNSDKLIARKKDWDPKKYGGFDSPTVAYSVLVVAKVEKGKSKKLKSVKELLGITIMERSSFEKNPIDFLEAKGYKEVKKDLIIKLPKYSLFELENGRKRMLASAGELQKGNELALPSKYVNFLYLASHYEKLKGSPEDNEQKQLFVEQHKHYLDEIIEQISEFSKRVILADANLDKVLSAYNKHRDKPIREQAENIIHLFTLTNLGAPAAFKYFDTTIDRKRYTSTKEVLDATLIHQSITGLYETRIDLSQLGGDSGGSSGGSSGSETPGTSESATPESSGGSSGGSSTLNIEDEYRLHETSKEPDVSLGSTWLSDFPQAWAETGGMGLAVRQAPLIIPLKATSTPVSIKQYPMSQEARLGIKPHIQRLLDQGILVPCQSPWNTPLLPVKKPGTNDYRPVQDLREVNKRVEDIHPTVPNPYNLLSGLPPSHQWYTVLDLKDAFFCLRLHPTSQPLFAFEWRDPEMGISGQLTWTRLPQGFKNSPTLFNEALHRDLADFRIQHPDLILLQYVDDLLLAATSELDCQQGTRALLQTLGNLGYRASAKKAQICQKQVKYLGYLLKEGQRWLTEARKETVMGQPTPKTPRQLREFLGKAGFCRLFIPGFAEMAAPLYPLTKPGTLFNWGPDQQKAYQEIKQALLTAPALGLPDLTKPFELFVDEKQGYAKGVLTQKLGPWRRPVAYLSKKLDPVAAGWPPCLRMVAAIAVLTKDAGKLTMGQPLVILAPHAVEALVKQPPDRWLSNARMTHYQALLLDTDRVQFGPVVALNPATLLPLPEEGLQHNCLDNSRLINSGGSKRTADGSEFEPKKKRKV

SEQ ID NO: 766 - protein, 503 aa, synthetic construct
  REGION 1..503: note = Synthetic
TLNIEDEYRLHETSKEPDVSLGSTWLSDFPQAWAETGGMGLAVRQAPLIIPLKATSTPVSIKQYPMSQEARLGIKPHIQRLLDQGILVPCQSPWNTPLLPVKKPGTNDYRPVQDLREVNKRVEDIHPTVPNPYNLLSGLPPSHQWYTVLDLKDAFFCLRLHPTSQPLFAFEWRDPEMGISGQLTWTRLPQGFKNSPTLFNEALHRDLADFRIQHPDLILLQYVDDLLLAATSELDCQQGTRALLQTLGNLGYRASAKKAQICQKQVKYLGYLLKEGQRWLTEARKETVMGQPTPKTPRQLREFLGKAGFCRLFIPGFAEMAAPLYPLTKPGTLFNWGPDQQKAYQEIKQALLTAPALGLPDLTKPFELFVDEKQGYAKGVLTQKLGPWRRPVAYLSKKLDPVAAGWPPCLRMVAAIAVLTKDAGKLTMGQPLVILAPHAVEALVKQPPDRWLSNARMTHYQALLLDTDRVQFGPVVALNPATLLPLPEEGLQHNCLDNSRLIN

SEQ ID NO: 767 - skipped

SEQ ID NO: 768 - protein, 6 aa, synthetic construct
  REGION 1..6: note = Synthetic
GGSGGS

SEQ ID NO: 769 - protein, 9 aa, synthetic construct
  REGION 1..9: note = Synthetic
GGSGGSGGS

SEQ ID NO: 770-780 - skipped (11 entries)

SEQ ID NO: 781 - DNA, 48 bp, synthetic construct
  misc_feature 1..48: note = Synthetic
  source 1..48: mol_type = other DNA
aggaaccccgggtctgactcgtgcactaccgtctcctttcctctgcag

SEQ ID NO: 782 - protein, 8 aa, synthetic construct
  REGION 1..8: note = Synthetic
SLGPRLST

SEQ ID NO: 783 - DNA, 45 bp, synthetic construct
  misc_feature 1..45: note = Synthetic
  source 1..45: mol_type = other DNA
aaccccgggtctgactcgtgcactaccgtctcgtgtcctctgcag

SEQ ID NO: 784 - protein, 7 aa, synthetic construct
  REGION 1..7: note = Synthetic
LGPRLST

SEQ ID NO: 785 - DNA, 48 bp, synthetic construct
  misc_feature 1..48: note = Synthetic
  source 1..48: mol_type = other DNA
tccttggggcccagactgagcacgtgatggcagaggaaaggagacgtc

SEQ ID NO: 786 - DNA, 48 bp, synthetic construct
  misc_feature 1..48: note = Synthetic
  source 1..48: mol_type = other DNA
tccttggggcccagactgagcacgagatggcagaggaaaggagacgtc

SEQ ID NO: 787 - DNA, 45 bp, synthetic construct
  misc_feature 1..45: note = Synthetic
  source 1..45: mol_type = other DNA
ttggggcccagactgagcacgtgatggcagagcacaggagacgtc

SEQ ID NO: 788 - DNA, 45 bp, synthetic construct
  misc_feature 1..45: note = Synthetic
  source 1..45: mol_type = other DNA
ttggggcccagactgagcacgagatggcagagcacaggagacgtc

SEQ ID NO: 789 - DNA, 297 bp, synthetic construct
  misc_feature 1..297: note = Synthetic
  source 1..297: mol_type = other DNA
atgtgggctgcctagaaaggcatggatgagagaagcctggagacagggatcccagggaaacgcccatgcaattagtctatttctgctgcaagtaagcatgcatttgtaggcttgatgctttttttctgcttctccagccctggcctgggtcaatccttggggcccagactgagcacgtgatggcagaggaaaggaagccctgcttcctccagagggcgtcgcaggacagcttttcctagacaggggctagtatgtgcagctcctgcaccgggatactggttgacaagtttggctggg

SEQ ID NO: 790 - DNA, 297 bp, synthetic construct
  misc_feature 1..297: note = Synthetic
  source 1..297: mol_type = other DNA
cccagccaaacttgtcaaccagtatcccggtgcaggagctgcacatactagcccctgtctaggaaaagctgtcctgcgacgccctctggaggaagcagggcttcctttcctctgccatcacgtgctcagtctgggccccaaggattgacccaggccagggctggagaagcagaaaaaaagcatcaagcctacaaatgcatgcttacttgcagcagaaatagactaattgcatgggcgtttccctgggatccctgtctccaggcttctctcatccatgcctttctaggcagcccacat

SEQ ID NO: 791 - DNA, 40 bp, synthetic construct
  misc_feature 1..40: note = Synthetic
  source 1..40: mol_type = other DNA
tggggcccagactgagcacgtgatggcagaggaaaggaag

SEQ ID NO: 792 - DNA, 40 bp, synthetic construct
  misc_feature 1..40: note = Synthetic
  source 1..40: mol_type = other DNA
tggggcccagactgagcacgtgatggcaaaggaaaggaag

SEQ ID NO: 793 - DNA, 40 bp, synthetic construct
  misc_feature 1..40: note = Synthetic
  source 1..40: mol_type = other DNA
tggggcccagactgagcacgagatggcagaggaaaggaag

SEQ ID NO: 794 - DNA, 40 bp, synthetic construct
  misc_feature 1..40: note = Synthetic
  source 1..40: mol_type = other DNA
tggggcccagactgagcacgagatggcaaaggaaaggaag

SEQ ID NO: 795 - DNA, 29 bp, synthetic construct
  misc_feature 1..29: note = Synthetic
  source 1..29: mol_type = other DNA
ctgagcacgtgatggcagaggaaaggaag

SEQ ID NO: 796 - DNA, 19 bp, synthetic construct
  misc_feature 1..19: note = Synthetic
  source 1..19: mol_type = other DNA
ctgagcacgggaaaggaag

SEQ ID NO: 797 - DNA, 29 bp, synthetic construct
  misc_feature 1..29: note = Synthetic
  source 1..29: mol_type = other DNA
ctgagcacgtgatggcaaaggaaaggaag

SEQ ID NO: 798 - skipped

SEQ ID NO: 799 - DNA, 16 bp, synthetic construct
  misc_feature 1..16: note = Synthetic
  source 1..16: mol_type = other DNA
ctgagcacgggaaagg

SEQ ID NO: 800 - DNA, 29 bp, synthetic construct
  misc_feature 1..29: note = Synthetic
  source 1..29: mol_type = other DNA
ctgagcacgtgatggcaggggaaaggaag

SEQ ID NO: 801 - DNA, 31 bp, synthetic construct
  misc_feature 1..31: note = Synthetic
  source 1..31: mol_type = other DNA
gactgagcacgtgatggcagaggaaaggaag

SEQ ID NO: 802 - DNA, 31 bp, synthetic construct
  misc_feature 1..31: note = Synthetic
  source 1..31: mol_type = other DNA
gactgagcacgcaccatcatcaccatcattg

SEQ ID NO: 803 - DNA, 31 bp, synthetic construct
  misc_feature 1..31: note = Synthetic
  source 1..31: mol_type = other DNA
gactgagcacgtgatggcaaaggaaaggaag

SEQ ID NO: 804 - DNA, 31 bp, synthetic construct
  misc_feature 1..31: note = Synthetic
  source 1..31: mol_type = other DNA
gactgagcacggattacaaggatgacgacga

SEQ ID NO: 805 - protein, 7 aa, synthetic construct
  REGION 1..7: note = Synthetic
GLGGTML

SEQ ID NO: 806 - DNA, 21 bp, synthetic construct
  misc_feature 1..21: note = Synthetic
  source 1..21: mol_type = other DNA
ggccttggcggctacatgctg

SEQ ID NO: 807 - DNA, 21 bp, synthetic construct
  misc_feature 1..21: note = Synthetic
  source 1..21: mol_type = other DNA
ggccttggcgtctacatgctg

SEQ ID NO: 808 - protein, 7 aa, synthetic construct
  REGION 1..7: note = Synthetic
GLGVTML

SEQ ID NO: 809 - DNA, 36 bp, synthetic construct
  misc_feature 1..36: note = Synthetic
  source 1..36: mol_type = other DNA
ggggcagtggtggggggccttggcggctacatgctg

SEQ ID NO: 810 - DNA, 43 bp, synthetic construct
  misc_feature 1..43: note = Synthetic
  source 1..43: mol_type = other DNA
gcagtggtggggggccttggatgtagacgccaaggccccccac

SEQ ID NO: 811 - protein, 25 aa, synthetic construct
  REGION 1..25: note = Synthetic
NFKIRHNIEDGSVQLADHYQQNTPI

SEQ ID NO: 812 - protein, 24 aa, synthetic construct
  REGION 1..24: note = Synthetic
NFKIHNIEDGSVQLADHYQQNTPI

SEQ ID NO: 813 - protein, 24 aa, synthetic construct
  REGION 1..24: note = Synthetic
NFKIRNIEDGSVQLADHYQQNTPI

SEQ ID NO: 814 - protein, 24 aa, synthetic construct
  REGION 1..24: note = Synthetic
NFKIRHNEDGSVQLADHYQQNTPI

SEQ ID NO: 815 - protein, 19 aa, synthetic construct
  REGION 1..19: note = Synthetic
NFKIRHNQLADHYQQNTPI

SEQ ID NO: 816 - protein, 20 aa, synthetic construct
  REGION 1..20: note = Synthetic
HNIEDGSVQLADHYQQNTPI

SEQ ID NO: 817 - protein, 14 aa, synthetic construct
  REGION 1..14: note = Synthetic
NFKIRHNIEDGSVQ

SEQ ID NO: 818 - DNA, 12 bp, synthetic construct
  misc_feature 1..12: note = Synthetic
  source 1..12: mol_type = other DNA
actgcaagtgca

SEQ ID NO: 819 - DNA, 12 bp, synthetic construct
  misc_feature 1..12: note = Synthetic
  source 1..12: mol_type = other DNA
tgcagtgttcac

SEQ ID NO: 820 - RNA, 122 nt, synthetic construct
  misc_feature 1..122: note = Synthetic
  source 1..122: mol_type = other RNA
ggcccagactgagcacgtgagttttagagctagaaatagcaagttaaaataaggctagtccgttatcaacttgaaaaagtggcaccgagtcggtgctctgccatctcgtgctcagtctgttt

SEQ ID NO: 821 - DNA, 28 bp, synthetic construct
  misc_feature 1..28: note = Synthetic
  source 1..28: mol_type = other DNA
ggcccagactgagcacgtgatggcagag

SEQ ID NO: 822 - DNA, 28 bp, synthetic construct
  misc_feature 1..28: note = Synthetic
  source 1..28: mol_type = other DNA
gagatggcagagcagggggggggggggg

SEQ ID NO: 823 - DNA, 31 bp, synthetic construct
  misc_feature 1..31: note = Synthetic
  source 1..31: mol_type = other DNA
gagatggcagagcaaaaaaaaaaaaaaaaaa

SEQ ID NO: 824 - DNA, 32 bp, synthetic construct
  misc_feature 1..32: note = Synthetic
  source 1..32: mol_type = other DNA
ggcccagactgagcacgtgatggcagagcaca

SEQ ID NO: 825 - DNA, 32 bp, synthetic construct
  misc_feature 1..32: note = Synthetic
  source 1..32: mol_type = other DNA
ggcccagactgagcacgagatggcagagcaca

SEQ ID NO: 826 - DNA, 24 bp, synthetic construct
  misc_feature 1..24: note = Synthetic
  source 1..24: mol_type = other DNA
tccagatggcacattgtcagaggg

SEQ ID NO: 827 - DNA, 24 bp, synthetic construct
  misc_feature 1..24: note = Synthetic
  source 1..24: mol_type = other DNA
tgacgggagggcagaactagtcct

SEQ ID NO: 828 - DNA, 24 bp, synthetic construct
  misc_feature 1..24: note = Synthetic
  source 1..24: mol_type = other DNA
ttcagacagcatatttgagtcatt

SEQ ID NO: 829 - DNA, 40 bp, synthetic construct
  misc_feature 1..40: note = Synthetic
  source 1..40: mol_type = other DNA
tggggcccagactgagcacgtgatggcagcggaaaggaag

SEQ ID NO: 830 - DNA, 40 bp, synthetic construct
  misc_feature 1..40: note = Synthetic
  source 1..40: mol_type = other DNA
tggggcccagactgagcacgctttgatggcagaggaaagg

SEQ ID NO: 831 - DNA, 40 bp, synthetic construct
  misc_feature 1..40: note = Synthetic
  source 1..40: mol_type = other DNA
tggggcccagactgagcacgcttttgatggcagaggaaag

SEQ ID NO: 832 - DNA, 39 bp, synthetic construct
  misc_feature 1..39: note = Synthetic
  source 1..39: mol_type = other DNA
tggggcccagactgagcactgatggcagaggaaaggaag

SEQ ID NO: 833 - DNA, 38 bp, synthetic construct
  misc_feature 1..38: note = Synthetic
  source 1..38: mol_type = other DNA
tggggcccagactgagcatgatggcagaggaaaggaag

SEQ ID NO: 834 - DNA, 38 bp, synthetic construct
  misc_feature 1..38: note = Synthetic
  source 1..38: mol_type = other DNA
tggggcccagactgagcacgatggcagaggaaaggaag

SEQ ID NO: 835 - DNA, 40 bp, synthetic construct
  misc_feature 1..40: note = Synthetic
  source 1..40: mol_type = other DNA
tggggcccagactgagcacggtgatggcagaggaaaggaa

SEQ ID NO: 836 - DNA, 39 bp, synthetic construct
  misc_feature 1..39: note = Synthetic
  source 1..39: mol_type = other DNA
tggggcccagactgagcacggatggcagaggaaaggaag

SEQ ID NO: 837 - DNA, 40 bp, synthetic construct
  misc_feature 1..40: note = Synthetic
  source 1..40: mol_type = other DNA
tggggcccagactgagcacgttgatggcagaggaaaggaa

SEQ ID NO: 838 - DNA, 32 bp, synthetic construct
  misc_feature 1..32: note = Synthetic
  source 1..32: mol_type = other DNA
tggggcccagactgatggcagaggaaaggaag

SEQ ID NO: 839 - DNA, 40 bp, synthetic construct
  misc_feature 1..40: note = Synthetic
  source 1..40: mol_type = other DNA
tggggcccagactgagcacgatgatggcagaggaaaggaa

SEQ ID NO: 840 - DNA, 34 bp, synthetic construct
  misc_feature 1..34: note = Synthetic
  source 1..34: mol_type = other DNA
tggggcccagactgagcacgcagaggaaaggaag

SEQ ID NO: 841 - DNA, 26 bp, synthetic construct
  misc_feature 1..26: note = Synthetic
  source 1..26: mol_type = other DNA
tggggctgatggcagaggaaaggaag

SEQ ID NO: 842 - DNA, 30 bp, synthetic construct
  misc_feature 1..30: note = Synthetic
  source 1..30: mol_type = other DNA
tggggcccagactgagcagaggaaaggaag

SEQ ID NO: 843 - DNA, 40 bp, synthetic construct
  misc_feature 1..40: note = Synthetic
  source 1..40: mol_type = other DNA
tggggcccagactgagcacgctgatggcagaggaaaggaa

SEQ ID NO: 844 - DNA, 27 bp, synthetic construct
  misc_feature 1..27: note = Synthetic
  source 1..27: mol_type = other DNA
tggggcctgatggcagaggaaaggaag

SEQ ID NO: 845 - DNA, 25 bp, synthetic construct
  misc_feature 1..25: note = Synthetic
  source 1..25: mol_type = other DNA
tggggtgatggcagaggaaaggaag

SEQ ID NO: 846 - DNA, 31 bp, synthetic construct
  misc_feature 1..31: note = Synthetic
  source 1..31: mol_type = other DNA
tggggcccagactgagcacgaggaaaggaag

SEQ ID NO: 847 - DNA, 33 bp, synthetic construct
  misc_feature 1..33: note = Synthetic
  source 1..33: mol_type = other DNA
tggggcccagactgagcacgagaggaaaggaag

SEQ ID NO: 848 - DNA, 36 bp, synthetic construct
  misc_feature 1..36: note = Synthetic
  source 1..36: mol_type = other DNA
tggggcccagactgagcacgggcagaggaaaggaag

SEQ ID NO: 849 - DNA, 25 bp, synthetic construct
  misc_feature 1..25: note = Synthetic
  source 1..25: mol_type = other DNA
tggggcccagactgaggaaaggaag

SEQ ID NO: 850 - DNA, 19 bp, synthetic construct
  misc_feature 1..19: note = Synthetic
  source 1..19: mol_type = other DNA
tggggcagaggaaaggaag

SEQ ID NO: 851 - DNA, 29 bp, synthetic construct
  misc_feature 1..29: note = Synthetic
  source 1..29: mol_type = other DNA
tggggcccagactgagcacggaaaggaag

SEQ ID NO: 852 - DNA, 28 bp, synthetic construct
  misc_feature 1..28: note = Synthetic
  source 1..28: mol_type = other DNA
tggggcccagatggcagaggaaaggaag

SEQ ID NO: 853 - DNA, 28 bp, synthetic construct
  misc_feature 1..28: note = Synthetic
  source 1..28: mol_type = other DNA
tggggcccagactgagcacgaaaggaag

SEQ ID NO: 854 - DNA, 21 bp, synthetic construct
  misc_feature 1..21: note = Synthetic
  source 1..21: mol_type = other DNA
tggatggcagaggaaaggaag

SEQ ID NO: 855 - DNA, 39 bp, synthetic construct
  misc_feature 1..39: note = Synthetic
  source 1..39: mol_type = other DNA
tggggcccagactgagctttgatggcagaggaaaggaag

SEQ ID NO: 856 - DNA, 23 bp, synthetic construct
  misc_feature 1..23: note = Synthetic
  source 1..23: mol_type = other DNA
tggggcccagactgagcacgaag

SEQ ID NO: 857 - DNA, 32 bp, synthetic construct
  misc_feature 1..32: note = Synthetic
  source 1..32: mol_type = other DNA
tggggcccagactgagcacggaggaaaggaag

SEQ ID NO: 858 - DNA, 24 bp, synthetic construct
  misc_feature 1..24: note = Synthetic
  source 1..24: mol_type = other DNA
tggggcccagactgagcacggaag

SEQ ID NO: 859 - DNA, 21 bp, synthetic construct
  misc_feature 1..21: note = Synthetic
  source 1..21: mol_type = other DNA
tggggcccagaggaaaggaag

SEQ ID NO: 860 - DNA, 30 bp, synthetic construct
  misc_feature 1..30: note = Synthetic
  source 1..30: mol_type = other DNA
tggggcccagtgatggcagaggaaaggaag

SEQ ID NO: 861 - DNA, 23 bp, synthetic construct
  misc_feature 1..23: note = Synthetic
  source 1..23: mol_type = other DNA
tggtgatggcagaggaaaggaag

SEQ ID NO: 862 - DNA, 40 bp, synthetic construct
  misc_feature 1..40: note = Synthetic
  source 1..40: mol_type = other DNA
tggggcccagactgagcacgtgtgatggcagaggaaagga

SEQ ID NO: 863 - DNA, 18 bp, synthetic construct
  misc_feature 1..18: note = Synthetic
  source 1..18: mol_type = other DNA
atggcagaggaaaggaag

SEQ ID NO: 864 - DNA, 34 bp, synthetic construct
  misc_feature 1..34: note = Synthetic
  source 1..34: mol_type = other DNA
tggggcccagactgtgatggcagaggaaaggaag

SEQ ID NO: 865 - DNA, 36 bp, synthetic construct
  misc_feature 1..36: note = Synthetic
  source 1..36: mol_type = other DNA
tggggcccagactgagtgatggcagaggaaaggaag

SEQ ID NO: 866 - DNA, 28 bp, synthetic construct
  misc_feature 1..28: note = Synthetic
  source 1..28: mol_type = other DNA
tggggccctgatggcagaggaaaggaag

SEQ ID NO: 867 - DNA, 35 bp, synthetic construct
  misc_feature 1..35: note = Synthetic
  source 1..35: mol_type = other DNA
tggggcccagactgagcacggcagaggaaaggaag

SEQ ID NO: 868 - DNA, 40 bp, synthetic construct
  misc_feature 1..40: note = Synthetic
  source 1..40: mol_type = other DNA
cctgaaccgtatatcctatggccctgactggaaggatttc

SEQ ID NO: 869 - DNA, 40 bp, synthetic construct
  misc_feature 1..40: note = Synthetic
  source 1..40: mol_type = other DNA
aaccgtatatctatcctatggccctgactggaaggatttc

SEQ ID NO: 870 - DNA, 40 bp, synthetic construct
  misc_feature 1..40: note = Synthetic
  source 1..40: mol_type = other DNA
aaccgtatatctatcctattgccctgactggaaggatttc

SEQ ID NO: 871 - DNA, 40 bp, synthetic construct
  misc_feature 1..40: note = Synthetic
  source 1..40: mol_type = other DNA
aaccgtatatctatcctatgtccctgactggaaggatttc

SEQ ID NO: 872 - DNA, 40 bp, synthetic construct
  misc_feature 1..40: note = Synthetic
  source 1..40: mol_type = other DNA
aaccgtatatctatcctatggccctgactggaaggctttc

SEQ ID NO: 873 - DNA, 40 bp, synthetic construct
  misc_feature 1..40: note = Synthetic
  source 1..40: mol_type = other DNA
aaccgtatatctatcctctggccctgactggaaggatttc

SEQ ID NO: 874 - DNA, 40 bp, synthetic construct
  misc_feature 1..40: note = Synthetic
  source 1..40: mol_type = other DNA
aaccgtatatctatcctctggccctgactggaaggctttc

SEQ ID NO: 875 - DNA, 40 bp, synthetic construct
  misc_feature 1..40: note = Synthetic
  source 1..40: mol_type = other DNA
caccatggtgcacctgactcctgaggagaagtctgccgtt

SEQ ID NO: 876 - DNA, 40 bp, synthetic construct
  misc_feature 1..40: note = Synthetic
  source 1..40: mol_type = other DNA
caccatggtgcacctgactcctgtggagaagtctgccgtt

SEQ ID NO: 877 - DNA, 40 bp, synthetic construct
  misc_feature 1..40: note = Synthetic
  source 1..40: mol_type = other DNA
caccatggcgcacctgactcctgtggagaagtctgccgtt

SEQ ID NO: 878 - DNA, 40 bp, synthetic construct
  misc_feature 1..40: note = Synthetic
  source 1..40: mol_type = other DNA
caccatggtgcacctgactcctgtggagaagtctgtcgtt

SEQ ID NO: 879-880 - skipped (2 entries)

SEQ ID NO: 881 - DNA, 67 bp, synthetic construct
  misc_feature 1..67: note = Synthetic
  source 1..67: mol_type = other DNA
agagctagaaatagcaagttaaaataaggctagtccgttatcaacttgaaaaagtggcaccgagtcg

SEQ ID NO: 882 - DNA, 67 bp, synthetic construct
  misc_feature 1..67: note = Synthetic
  source 1..67: mol_type = other DNA
gcaccgactcggtgccactttttcaagttgataacggactagccttattttaacttgctatttctag

SEQ ID NO: 883-884 - skipped (2 entries)

SEQ ID NO: 885 - DNA, 104 bp, synthetic construct
  misc_feature 1..104: note = Synthetic
  source 1..104: mol_type = other DNA
cagaggaccgactcggtcccactttttcaagttgataacggactagccttattttaacttgctatttctagctctaaaactcacgtgctcagtctgggccggtg

SEQ ID NO: 886 - DNA, 105 bp, synthetic construct
  misc_feature 1..105: note = Synthetic
  source 1..105: mol_type = other DNA
atcacgcaccgactcggtgccactttttcaagttgataacggactagccttattttaacttgctatttctagctctaaaacttcttcttctgctcggactcggtg

SEQ ID NO: 887 - DNA, 105 bp, synthetic construct
  misc_feature 1..105: note = Synthetic
  source 1..105: mol_type = other DNA
tttccgcaccgactcggtgccactttttcaagttgataacggactagccttattttaacttgctatttctagctctaaaacggtgctgcagaagggattccggtg

SEQ ID NO: 888 - DNA, 105 bp, synthetic construct
  misc_feature 1..105: note = Synthetic
  source 1..105: mol_type = other DNA
tcgttgcaccgactcggtgccactttttcaagttgataacggactagccttattttaacttgctatttctagctctaaaaccaggtaatgactaagatgacggtg

SEQ ID NO: 889 - DNA, 75 bp, synthetic construct
  misc_feature 1..75: note = Synthetic
  source 1..75: mol_type = other DNA
tccttggggcccagactgagcacgtgatggcagaggaaaggaagccctgcttcctccagagggcgtcgcaggaca

SEQ ID NO: 890 - protein, 24 aa, synthetic construct
  REGION 1..24: note = Synthetic
SLGPRLSTWQRKGSPASSRGRRRT

SEQ ID NO: 891 - DNA, 75 bp, synthetic construct
  misc_feature 1..75: note = Synthetic
  source 1..75: mol_type = other DNA
tgtcctgcgacgccctctggaggaagcagggcttcctttcctctgccatcacgtgctcagtctgggccccaagga

SEQ ID NO: 892 - DNA, 201 bp, synthetic construct
  misc_feature 1..201: note = Synthetic
  source 1..201: mol_type = other DNA
tattattactctatgttctatttaagttttcatgttctaaaaatgtatcccagtttacacgtctcatatgccccttggcagtcatcttagtcattacctgaggtgttcgttgtaactcatataaactgagttcccatgttttgcttaatggttgagttccgtttgtctgcacagcctgagacattgctggaaataaagaag

SEQ ID NO: 893 - DNA, 201 bp, synthetic construct
  misc_feature 1..201: note = Synthetic
  source 1..201: mol_type = other DNA
cttctttatttccagcaatgtctcaggctgtgcagacaaacggaactcaaccattaagcaaaacatgggaactcagtttatatgagttacaacgaacacctcaggtaatgactaagatgactgccaaggggcatatgagacgtgtaaactgggatacatttttagaacatgaaaacttaaatagaacatagagtaataata

SEQ ID NO: 894 - DNA, 20 bp, synthetic construct
  misc_feature 1..20: note = Synthetic
  source 1..20: mol_type = other DNA
gtcatcttagtcattacctg

SEQ ID NO: 895 - DNA, 29 bp, synthetic construct
  misc_feature 1..29: note = Synthetic
  source 1..29: mol_type = other DNA
aacgaacaccgcaggtaatgactaagatg

SEQ ID NO: 896 - DNA, 76 bp, synthetic construct; identical to SEQ ID NO: 131
  misc_feature 1..76: note = Synthetic
  source 1..76: mol_type = other DNA

SEQ ID NO: 897 - RNA, 126 nt, synthetic construct
  misc_feature 1..126: note = Synthetic
  source 1..126: mol_type = other RNA
gaaggcaataatgctaattacagttttagagctagaaatagcaagttaaaataaggctagtccgttatcaacttgaaaaagtggcaccgagtaggtgcnnnnnnnnnnnnnnnnnnnnnnnnnttt

SEQ ID NO: 898 - RNA, 135 nt, synthetic construct
  misc_feature 1..135: note = Synthetic
  source 1..135: mol_type = other RNA
gaaggcaataatgctaattacagttttagagctagaaatagcaagttaaaataaggctagtccgttatcaacttgaaaaagtggcaccgagtaggtgcnnnnnnnnnnnnnnnnnnnnnnnnngaaannnnnttt

SEQ ID NO: 899 - protein, 18 aa, synthetic construct
  REGION 1..18: note = Synthetic
AACAGNRVRRSVGSSLKC

SEQ ID NO: 900 - protein, 15 aa, synthetic construct
  REGION 1..15: note = Synthetic
AADHCPVVEVNGVTI

SEQ ID NO: 901 - protein, 13 aa, synthetic construct
  REGION 1..13: note = Synthetic
AAHLPTGTPLDID

SEQ ID NO: 902 - protein, 12 aa, synthetic construct
  REGION 1..12: note = Synthetic
AALAVWAGLAVQ

SEQ ID NO: 903 - protein, 15 aa, synthetic construct
  REGION 1..15: note = Synthetic
AALGVATAAQITAGI

SEQ ID NO: 904 - protein, 24 aa, synthetic construct
  REGION 1..24: note = Synthetic
AALLNTPPPYQVSCGGESDRATAR

SEQ ID NO: 905 - protein, 15 aa, synthetic construct
  REGION 1..15: note = Synthetic
AAQSFTGVVYGTHTT

SEQ ID NO: 906 - protein, 15 aa, synthetic construct
  REGION 1..15: note = Synthetic
ACEVEPAFGHSDAAC

SEQ ID NO: 907 - protein, 15 aa, synthetic construct
  REGION 1..15: note = Synthetic
ACTFWAVNAYSSGGY

SEQ ID NO: 908 - protein, 7 aa, synthetic construct
  REGION 1..7: note = Synthetic
ADDPLLR

SEQ ID NO: 909 - protein, 8 aa, synthetic construct
  REGION 1..8: note = Synthetic
ADDPLLRT

SEQ ID NO: 910 - protein, 15 aa, synthetic construct
  REGION 1..15: note = Synthetic
AEMICDIDTYIVEAG

SEQ ID NO: 911 - protein, 20 aa, synthetic construct
  REGION 1..20: note = Synthetic
AEMICDIDTYIVEAGLASFI

SEQ ID NO: 912 - protein, 7 aa, synthetic construct
  REGION 1..7: note = Synthetic
AEPLLSC

SEQ ID NO: 913 - protein, 15 aa, synthetic construct
  REGION 1..15: note = Synthetic
AFVSTSSSRRYTEVY

SEQ ID NO: 914 - protein, 31 aa, synthetic construct
  REGION 1..31: note = Synthetic
AGFIYRETFCITTIYKTGQPAADHYYSKVTA

SEQ ID NO: 915 - protein, 15 aa, synthetic construct
  REGION 1..15: note = Synthetic
AGLLACCAKCLYYLR

SEQ ID NO: 916 - protein, 12 aa, synthetic construct
  REGION 1..12: note = Synthetic
AHTTSDPWHPPG

SEQ ID NO: 917 - protein, 15 aa, synthetic construct
  REGION 1..15: note = Synthetic
AIAKLEDAKELLESS

SEQ ID NO: 918 - protein, 15 aa, synthetic construct
  REGION 1..15: note = Synthetic
AIDNLRASLETTNQA

SEQ ID NO: 919 - protein, 7 aa, synthetic construct
  REGION 1..7: note = Synthetic
AKGVEFR

SEQ ID NO: 920 - protein, 15 aa, synthetic construct
  REGION 1..15: note = Synthetic
AKWAVPTTRTDDKLR

SEQ ID NO: 921 - protein, 10 aa, synthetic construct
  REGION 1..10: note = Synthetic
ALAEVLKKPV

SEQ ID NO: 922 - protein, 15 aa, synthetic construct
  REGION 1..15: note = Synthetic
ALGVINTLEWIPRFK

SEQ ID NO: 923 - protein, 15 aa, synthetic construct
  REGION 1..15: note = Synthetic
ALHQSMLNSQAIDNL

SEQ ID NO: 924 - protein, 10 aa, synthetic construct
  REGION 1..10: note = Synthetic
ALIGILSLFV

SEQ ID NO: 925 - protein, 20 aa, synthetic construct
  REGION 1..20: note = Synthetic
ALLNTPPPYQVSCGGESDRA

SEQ ID NO: 926 - protein, 24 aa, synthetic construct
  REGION 1..24: note = Synthetic
ALLNTPPPYQVSCGGESDRASARV

SEQ ID NO: 927 - protein, 15 aa, synthetic construct
  REGION 1..15: note = Synthetic
ALVEGLAPGGGNCHL

SEQ ID NO: 928 - protein, 12 aa, synthetic construct
  REGION 1..12: note = Synthetic
AMAAWSERAGEA

SEQ ID NO: 929 - protein, 15 aa, synthetic construct
  REGION 1..15: note = Synthetic
ANCASILCKCYTTGT

SEQ ID NO: 930 - protein, 12 aa, synthetic construct
  REGION 1..12: note = Synthetic
ANPNPYTSRRSV

SEQ ID NO: 931 - protein, 8 aa, synthetic construct
  REGION 1..8: note = Synthetic
APGPGEVW

SEQ ID NO: 932 - protein, 23 aa, synthetic construct
  REGION 1..23: note = Synthetic
APLPPHTTERIETRSARHPWRIR

SEQ ID NO: 933 - protein, 27 aa, synthetic construct
  REGION 1..27: note = Synthetic
APPMPPQPPRAHGQHYGHHHHQLPFLG

SEQ ID NO: 934 - protein, 27 aa, synthetic construct
  REGION 1..27: note = Synthetic
APPTLPQPPCAHGQHYGHHHHQLPFLG

SEQ ID NO: 935 - protein, 27 aa, synthetic construct
  REGION 1..27: note = Synthetic
APPTLPQPPRAHGQHYGHHHHQLPFLG

SEQ ID NO: 936 - protein, 22 aa, synthetic construct
  REGION 1..22: note = Synthetic
APQPGPQPPQPPQPQPEAPAPQ

SEQ ID NO: 937 - protein, 15 aa, synthetic construct
  REGION 1..15: note = Synthetic
AQLASYFNPGGSYYK

SEQ ID NO: 938 - protein, 13 aa, synthetic construct
  REGION 1..13: note = Synthetic
ARAAHLPTGTPLD

SEQ ID NO: 939 - protein, 15 aa, synthetic construct
  REGION 1..15: note = Synthetic
ARLVSEIAMHTTEDK

SEQ ID NO: 940 - protein, 20 aa, synthetic construct
  REGION 1..20: note = Synthetic
ARLVSEIAMHTTEDKISRAV

SEQ ID NO: 941 - protein, 17 aa, synthetic construct
  REGION 1..17: note = Synthetic
ASDVETAEGGEIHELLR

SEQ ID NO: 942 - protein, 19 aa, synthetic construct
  REGION 1..19: note = Synthetic
ASDVETAEGGEIHELLRLQ

SEQ ID NO: 943 - protein, 21 aa, synthetic construct
  REGION 1..21: note = Synthetic
ASDVETAEGGEIHELLRLQSR

SEQ ID NO: 944 - protein, 19 aa, synthetic construct
  REGION 1..19: note = Synthetic
ASDVETAEGGEIHKLLRLQ

SEQ ID NO: 945 - protein, 12 aa, synthetic construct
  REGION 1..12: note = Synthetic
ASDVLPGHWLQG

SEQ ID NO: 946 - protein, 15 aa, synthetic construct
  REGION 1..15: note = Synthetic
ASELGITAEDARLVS

SEQ ID NO: 947 - protein, 20 aa, synthetic construct
  REGION 1..20: note = Synthetic
ASELGITAEDARLVSEIAMH

SEQ ID NO: 948 - protein, 13 aa, synthetic construct
  REGION 1..13: note = Synthetic
ASESSQDPQDSRR

SEQ ID NO: 949 - protein, 15 aa, synthetic construct
  REGION 1..15: note = Synthetic
ASILCKCYTTGTIIN

SEQ ID NO: 950 - protein, 15 aa, synthetic construct
  REGION 1..15: note = Synthetic
ASPVCQRHSPDCSRL

SEQ ID NO: 951 - protein, 12 aa, synthetic construct
  REGION 1..12: note = Synthetic
ASQARWTGATRA

SEQ ID NO: 952 - protein, 28 aa, synthetic construct
  REGION 1..28: note = Synthetic
ASYFNPGGSYYKQYHPTACEVEPAFGHS

SEQ ID NO: 953 - protein, 15 aa, synthetic construct
  REGION 1..15: note = Synthetic
ASYKVMTRSSHQSLV

SEQ ID NO: 954 - protein, 12 aa, synthetic construct
  REGION 1..12: note = Synthetic
ASYVKKPKEDVD

SEQ ID NO: 955 - protein, 15 aa, synthetic construct
  REGION 1..15: note = Synthetic
ATAAQITAGIALHQS

SEQ ID NO: 956 - protein, 8 aa, synthetic construct
  REGION 1..8: note = Synthetic
ATPERPRL

SEQ ID NO: 957 - protein, 15 aa, synthetic construct
  REGION 1..15: note = Synthetic
AVCLGGLIGIPALIC

SEQ ID NO: 958 - protein, 11 aa, synthetic construct
  REGION 1..11: note = Synthetic
AVGPRQAQVSF

SEQ ID NO: 959 - protein, 15 aa, synthetic construct
  REGION 1..15: note = Synthetic
AVNAYSSGGYAQLAS

SEQ ID NO: 960 - protein, 15 aa, synthetic construct
  REGION 1..15: note = Synthetic
AVSETRQTWAEWAAA

SEQ ID NO: 961 - protein, 15 aa, synthetic construct
  REGION 1..15: note = Synthetic
AVTAPDTAADSELRR

SEQ ID NO: 962 - protein, 20 aa, synthetic construct
  REGION 1..20: note = Synthetic
AVTAPDTAADSELRRWIKYT

SEQ ID NO: 963 - protein, 22 aa, synthetic construct
  REGION 1..22: note = Synthetic
AYGGIIKDAPPGAGFIYRETFC

SEQ ID NO: 964 - protein, 15 aa, synthetic construct
  REGION 1..15: note = Synthetic
CALPLAGLLACCAKC

SEQ ID NO: 965 - protein, 15 aa, synthetic construct
  REGION 1..15: note = Synthetic
CARIWNGTQRACTFW

SEQ ID NO: 966 - protein, 15 aa, synthetic construct
  REGION 1..15: note = Synthetic
CARTLVSGSFGNRFI

SEQ ID NO: 967 - protein, 22 aa, synthetic construct
  REGION 1..22: note = Synthetic
CASPYEGRYRDMYDALRBRLLY

SEQ ID NO: 968 - protein, 14 aa, synthetic construct
  REGION 1..14: note = Synthetic
CAVFVRSGQPVIGA

SEQ ID NO: 969 - protein, 16 aa, synthetic construct
  REGION 1..16: note = Synthetic
CCAKCLYYLRGAIAPR

SEQ ID NO: 970 - protein, 15 aa, synthetic construct
  REGION 1..15: note = Synthetic
CCRGRCNKKGEQVGM

SEQ ID NO: 971 - protein, 15 aa, synthetic construct
  REGION 1..15: note = Synthetic
CEIPTDVSCEGLGAW

SEQ ID NO: 972 - protein, 16 aa, synthetic construct
  REGION 1..16: note = Synthetic
CFGKDLKRPGSSPMEV

SEQ ID NO: 973 - protein, 15 aa, synthetic construct
  REGION 1..15: note = Synthetic
CFQQACKGKIQALCE

SEQ ID NO: 974 - protein, 29 aa, synthetic construct
  REGION 1..29: note = Synthetic
CFQQACKGKIQALCENPEWAPLKDNRIPS

SEQ ID NO: 975 - protein, 15 aa, synthetic construct
  REGION 1..15: note = Synthetic
CGGESDRASARVIDP

SEQ ID NO: 976 - protein, 22 aa, synthetic construct
  REGION 1..22: note = Synthetic
CITTIYKTGQPAADHYYSKVTA

SEQ ID NO: 977 - protein, 15 aa, synthetic construct
  REGION 1..15: note = Synthetic
CKGKIQALCENPEWA

SEQ ID NO: 978 - protein, 13 aa, synthetic construct
  REGION 1..13: note = Synthetic
CKPWQESRKNKAQ

SEQ ID NO: 979 - protein, 15 aa, synthetic construct
  REGION 1..15: note = Synthetic
CNKKGEQVGMSRPGL

SEQ ID NO: 980 - protein, 15 aa, synthetic construct
  REGION 1..15: note = Synthetic
CNVTTEHPFCNTPHG

SEQ ID NO: 981 - protein, 10 aa, synthetic construct
  REGION 1..10: note = Synthetic
CQVGSSNSAF

SEQ ID NO: 982 - protein, 12 aa, synthetic construct
  REGION 1..12: note = Synthetic
CSGPTTIRGQFS

SEQ ID NO: 983 - protein, 16 aa, synthetic construct
  REGION 1..16: note = Synthetic
CTSPYDGKYWSMYSRL

SEQ ID NO: 984 - protein, 15 aa, synthetic construct
  REGION 1..15: note = Synthetic
CVLADSESGGHITHS

SEQ ID NO: 985 - protein, 24 aa, synthetic construct
  REGION 1..24: note = Synthetic
CYTTGTIINQDPDKILTYIAADHC

SEQ ID NO: 986 - protein, 8 aa, synthetic construct
  REGION 1..8: note = Synthetic
DADDPLLR

SEQ ID NO: 987 - protein, 15 aa, synthetic construct
  REGION 1..15: note = Synthetic
DARAAHLPTGTPLDI

SEQ ID NO: 988 - protein, 20 aa, synthetic construct
  REGION 1..20: note = Synthetic
DARAAHLPTGTPLDIDTASE

SEQ ID NO: 989 - protein, 15 aa, synthetic construct
  REGION 1..15: note = Synthetic
DCHAPTYLPAEVDGD

SEQ ID NO: 990 - protein, 15 aa, synthetic construct
  REGION 1..15: note = Synthetic
DCSRLVGATPERPRL

SEQ ID NO: 991 - protein, 15 aa, synthetic construct
  REGION 1..15: note = Synthetic
DDKLRMETCFQQACK

SEQ ID NO: 992 - protein, 8 aa, synthetic construct
  REGION 1..8: note = Synthetic
DDPLLRTA

SEQ ID NO: 993 - protein, 15 aa, synthetic construct
  REGION 1..15: note = Synthetic
DDPLLRTAPGPGEVW

SEQ ID NO: 994 - protein, 11 aa, synthetic construct
  REGION 1..11: note = Synthetic
DDPPATVYRYD

SEQ ID NO: 995 - protein, 17 aa, synthetic construct
  REGION 1..17: note = Synthetic
DDPPATVYRYDSRPPED

SEQ ID NO: 996 - protein, 18 aa, synthetic construct
  REGION 1..18: note = Synthetic
DDPPATVYRYDSRPPEDV

SEQ ID NO: 997 - protein, 15 aa, synthetic construct
  REGION 1..15: note = Synthetic
DEVGLRTPQRFTDLV

SEQ ID NO: 998 - protein, 15 aa, synthetic construct
  REGION 1..15: note = Synthetic
DHCPVVEVNGVTIQV

SEQ ID NO: 999 - protein, 13 aa, synthetic construct
  REGION 1..13: note = Synthetic
DIDTASESSQDPQ

SEQ ID NO: 1000 - protein, 15 aa, synthetic construct
  REGION 1..15: note = Synthetic
DINKVLEKLGYSGGD

SEQ ID NO: 1001 - protein, 7 aa, synthetic construct
  REGION 1..7: note = Synthetic
DLIAYKQ

SEQ ID NO: 1002 - protein, 15 aa, synthetic construct
  REGION 1..15: note = Synthetic
DLIGQKLGLKLLRYY

SEQ ID NO: 1003 - protein, 19 aa, synthetic construct
  REGION 1..19: note = Synthetic
DLQKALEAQSRALRAELAA

SEQ ID NO: 1004 - protein, 15 aa, synthetic construct
  REGION 1..15: note = Synthetic
DLQYVLATYDTSRVE

SEQ ID NO: 1005 - protein, 9 aa, synthetic construct
  REGION 1..9: note = Synthetic
DLSLRRFMV

SEQ ID NO: 1006 - protein, 15 aa, synthetic construct
  REGION 1..15: note = Synthetic
DLSNCMVALGELKLA

SEQ ID NO: 1007 - protein, 24 aa, synthetic construct
  REGION 1..24: note = Synthetic
DLVEYIMNYTGNQQSRWGLGSPNC

SEQ ID NO: 1008 - protein, 15 aa, synthetic construct
  REGION 1..15: note = Synthetic
DLVKFISDKIKFLNP

SEQ ID NO: 1009 - protein, 15 aa, synthetic construct
  REGION 1..15: note = Synthetic
DLVKFISTKIKFLNP

SEQ ID NO: 1010 - protein, 10 aa, synthetic construct
  REGION 1..10: note = Synthetic
DLYKSNHNNV

SEQ ID NO: 1011 - protein, 10 aa, synthetic construct
  REGION 1..10: note = Synthetic
DNVLDHLTGR

SEQ ID NO: 1012 - protein, 12 aa, synthetic construct
  REGION 1..12: note = Synthetic
DNVLDHLTGRSC

SEQ ID NO: 1013 - protein, 13 aa, synthetic construct
  REGION 1..13: note = Synthetic
DNVLDHLTGRSCQ

SEQ ID NO: 1014 - protein, 11 aa, synthetic construct
  REGION 1..11: note = Synthetic
DPDKILTYIAA

SEQ ID NO: 1015 - protein, 19 aa, synthetic construct
  REGION 1..19: note = Synthetic
DPGDLVEYIMNYTGNQQSR

SEQ ID NO: 1016 - protein, 8 aa, synthetic construct
  REGION 1..8: note = Synthetic
DPLLRTAP

SEQ ID NO: 1017 - protein, 22 aa, synthetic construct
  REGION 1..22: note = Synthetic
DPLLRTAPGPGEVWVTPVIGSQ

SEQ ID NO: 1018 - protein, 13 aa, synthetic construct
  REGION 1..13: note = Synthetic
DPQDSRRSAEPLL

SEQ ID NO: 1019 - protein, 15 aa, synthetic construct
  REGION 1..15: note = Synthetic
DPVIDRLYLSSHRGV

SEQ ID NO: 1020 - protein, 15 aa, synthetic construct
  REGION 1..15: note = Synthetic
DQILRSMKGLSSTSI

SEQ ID NO: 1021 - protein, 15 aa, synthetic construct
  REGION 1..15: note = Synthetic
DQYCADVAAEELMNA

SEQ ID NO: 1022 - protein, 10 aa, synthetic construct
  REGION 1..10: note = Synthetic
DSESGGHITH

SEQ ID NO: 1023 - protein, 13 aa, synthetic construct
  REGION 1..13: note = Synthetic
DTASESSQDPQDS

SEQ ID NO: 1024 - protein, 15 aa, synthetic construct
  REGION 1..15: note = Synthetic
DTVMSVFALASYVQH

SEQ ID NO: 1025 - protein, 14 aa, synthetic construct
  REGION 1..14: note = Synthetic
DVFQNGFTAWGNND

SEQ ID NO: 1026 - protein, 15 aa, synthetic construct
  REGION 1..15: note = Synthetic
DVGAVPPGKFVTAAL

SEQ ID NO: 1027 - protein, 16 aa, synthetic construct
  REGION 1..16: note = Synthetic
DVNKSKTHISVNGRKI

SEQ ID NO: 1028 - protein, 15 aa, synthetic construct
  REGION 1..15: note = Synthetic
DVSCEGLGAWVPAAP

SEQ ID NO: 1029 - protein, 27 aa, synthetic construct
  REGION 1..27: note = Synthetic
DWASPVCQRHSPDCSRLVGATPERPRL

SEQ ID NO: 1030 - protein, 13 aa, synthetic construct
  REGION 1..13: note = Synthetic
EARESYRETGPSR

SEQ ID NO: 1031 - protein, 13 aa, synthetic construct
  REGION 1..13: note = Synthetic
EAVEAERAGRGTG

SEQ ID NO: 1032 - protein, 15 aa, synthetic construct
  REGION 1..15: note = Synthetic
EDAKELLESSDQILR

SEQ ID NO: 1033 - protein, 13 aa, synthetic construct
  REGION 1..13: note = Synthetic
EDRRVKQSRGEAR

SEQ ID NO: 1034 - protein, 15 aa, synthetic construct
  REGION 1..15: note = Synthetic
EDSITIPYQGSGKGV

SEQ ID NO: 1035 - protein, 15 aa, synthetic construct
  REGION 1..15: note = Synthetic
EEAFTYLCTAPGCAT

SEQ ID NO: 1036 - protein, 15 aa, synthetic construct
  REGION 1..15: note = Synthetic
EGFNMILGTILAQIW

SEQ ID NO: 1037 - protein, 20 aa, synthetic construct
  REGION 1..20: note = Synthetic
EGFNMILGTILAQIWVLLAK

SEQ ID NO: 1038 - protein, 15 aa, synthetic construct
  REGION 1..15: note = Synthetic
EHPFCNTPHGQLEVQ

SEQ ID NO: 1039 - protein, 15 aa, synthetic construct
  REGION 1..15: note = Synthetic
EISDIEVQDPEGFNM

SEQ ID NO: 1040 - protein, 20 aa, synthetic construct
  REGION 1..20: note = Synthetic
EISDIEVQDPEGFNMILGTI

SEQ ID NO: 1041 - protein, 11 aa, synthetic construct
  REGION 1..11: note = Synthetic
EKPNLSSKRSE

SEQ ID NO: 1042 - protein, 15 aa, synthetic construct
  REGION 1..15: note = Synthetic
ELKLAALCHGEDSIT

SEQ ID NO: 1043 - protein, 15 aa, synthetic construct
  REGION 1..15: note = Synthetic
ELMNALVNSTLLETR

SEQ ID NO: 1044 - protein, 5 aa, synthetic construct
  REGION 1..5: note = Synthetic
ELPRL

SEQ ID NO: 1045 - protein, 23 aa, synthetic construct
  REGION 1..23: note = Synthetic
ENPEWAPLKDNRIPSYGVLSVDL

SEQ ID NO: 1046 - protein, 15 aa, synthetic construct
  REGION 1..15: note = Synthetic
EPIRDALNAMTQNIR

SEQ ID NO: 1047 - protein, 15 aa, synthetic construct
  REGION 1..15: note = Synthetic
EQVGMSRPGLKPDLT

SEQ ID NO: 1048 - protein, 8 aa, synthetic construct
  REGION 1..8: note = Synthetic
ERPRLRLV

SEQ ID NO: 1049 - protein, 15 aa, synthetic construct
  REGION 1..15: note = Synthetic
ERPRLRLVDADDPLL

SEQ ID NO: 1050 - protein, 17 aa, synthetic construct
  REGION 1..17: note = Synthetic
ESPGQLIQRITDDPDVS

SEQ ID NO: 1051 - protein, 15 aa, synthetic construct
  REGION 1..15: note = Synthetic
ESRGIKARITHVDTE

SEQ ID NO: 1052 - protein, 15 aa, synthetic construct
  REGION 1..15: note = Synthetic
ESSCTFMPEGTVCSQ

SEQ ID NO: 1053 - protein, 13 aa, synthetic construct
  REGION 1..13: note = Synthetic
ESSQDPQDSRRSA

SEQ ID NO: 1054 - protein, 15 aa, synthetic construct
  REGION 1..15: note = Synthetic
ETRTTNQFLAVSKGN

SEQ ID NO: 1055 - protein, 15 aa, synthetic construct
  REGION 1..15: note = Synthetic
EVDGDVKLSSNLVIL

SEQ ID NO: 1056 - protein, 9 aa, synthetic construct
  REGION 1..9: note = Synthetic
EVNGVTIQV

SEQ ID NO: 1057 - protein, 8 aa, synthetic construct
  REGION 1..8: note = Synthetic
EVWVTPVI

SEQ ID NO: 1058 - protein, 12 aa, synthetic construct
  REGION 1..12: note = Synthetic
EVWVTPVIGSQA

SEQ ID NO: 1059 - protein, 15 aa, synthetic construct
  REGION 1..15: note = Synthetic
EWAAAHWWQLTLGAT

SEQ ID NO: 1060 - protein, 15 aa, synthetic construct
  REGION 1..15: note = Synthetic
EWIPRFKVSPYLFTV

SEQ ID NO: 1061 - protein, 12 aa, synthetic construct
  REGION 1..12: note = Synthetic
FEYVDTYGDNAG

SEQ ID NO: 1062 - protein, 15 aa, synthetic construct
  REGION 1..15: note = Synthetic
FGPLITHGSGMDLYK

SEQ ID NO: 1063 - protein, 9 aa, synthetic construct
  REGION 1..9: note = Synthetic
FIFDALAEV

SEQ ID NO: 1064 - protein, 9 aa, synthetic construct
  REGION 1..9: note = Synthetic
FISDKIKFL

SEQ ID NO: 1065 - protein, 15 aa, synthetic construct
  REGION 1..15: note = Synthetic
FKRNKDKPPITSGSG

SEQ ID NO: 1066 - protein, 20 aa, synthetic construct
  REGION 1..20: note = Synthetic
FKRNKDKPPITSGSGGAIRG

SEQ ID NO: 1067 - protein, 15 aa, synthetic construct
  REGION 1..15: note = Synthetic
FKTVRPVALPRTLAP

SEQ ID NO: 1068 - protein, 9 aa, synthetic construct
  REGION 1..9: note = Synthetic
FLMDRHIIV

SEQ ID NO: 1069 - protein, 15 aa, synthetic construct
  REGION 1..15: note = Synthetic
FMAVLLTLQTPTGQI

SEQ ID NO: 1070 - protein, 15 aa, synthetic construct
  REGION 1..15: note = Synthetic
FMPEGTVCSQNALYP

SEQ ID NO: 1071 - protein, 9 aa, synthetic construct
  REGION 1..9: note = Synthetic
FMYMSLLGV

SEQ ID NO: 1072 - protein, 15 aa, synthetic construct
  REGION 1..15: note = Synthetic
FNVPIKEAGEDCHAP

SEQ ID NO: 1073 - protein, 15 aa, synthetic construct
  REGION 1..15: note = Synthetic
FRDLTWCINPPERIK

SEQ ID NO: 1074 - protein, 15 aa, synthetic construct
  REGION 1..15: note = Synthetic
FSHDDPISSDQSRFG

SEQ ID NO: 1075 - protein, 20 aa, synthetic construct
  REGION 1..20: note = Synthetic
FSHDDPISSDQSRFGWFENK

SEQ ID NO: 1076 - protein, 15 aa, synthetic construct
  REGION 1..15: note = Synthetic
FTDLVKFISDKIKFL

SEQ ID NO: 1077 - protein, 15 aa, synthetic construct
  REGION 1..15: note = Synthetic
FTWDQKLWCRHFCVL

SEQ ID NO: 1078 - protein, 32 aa, synthetic construct
  REGION 1..32: note = Synthetic
FVRDGQSVIGACASPYEGRYRDLYDALRRLLY

SEQ ID NO: 1079 - protein, 33 aa, synthetic construct
  REGION 1..33: note = Synthetic
FVRSGQPVIGACTSPYDGKYWSILYSRLRKMLY

SEQ ID NO: 1080 - protein, 15 aa, synthetic construct
  REGION 1..15: note = Synthetic
FYKDNPHPKGSRIVI

SEQ ID NO: 1081 - protein, 14 aa, synthetic construct
  REGION 1..14: note = Synthetic
GAASSYFEYVDTYG

SEQ ID NO: 1082 - protein, 21 aa, synthetic construct
  REGION 1..21: note = Synthetic
GAFDLKTTFCIMTTRNTGQPA

SEQ ID NO: 1083 - protein, 15 aa, synthetic construct
  REGION 1..15: note = Synthetic
GALIGILSLFVESPG

SEQ ID NO: 1084 - protein, 20 aa, synthetic construct
  REGION 1..20: note = Synthetic
GALIGILSLFVESPGQLIQR

SEQ ID NO: 1085 - protein, 8 aa, synthetic construct
  REGION 1..8: note = Synthetic
GATPERPR

SEQ ID NO: 1086 - protein, 24 aa, synthetic construct
  REGION 1..24: note = Synthetic
GAYGRCPNGTRALTVAELRGNAEL

SEQ ID NO: 1087 - protein, 15 aa, synthetic construct
  REGION 1..15: note = Synthetic
GCFAPWDLEATGACI

SEQ ID NO: 1088 - protein, 13 aa, synthetic construct
  REGION 1..13: note = Synthetic
GDINKVLEKLGYS

SEQ ID NO: 1089 - protein, 19 aa, synthetic construct
  REGION 1..19: note = Synthetic
GDINKVLEKLGYSGGDLLG

SEQ ID NO: 1090 - protein, 13 aa, synthetic construct
  REGION 1..13: note = Synthetic
GDLRAVHHRPVPA

SEQ ID NO: 1091 - protein, 15 aa, synthetic construct
  REGION 1..15: note = Synthetic
GDLVEYIMNYTGNQQ

SEQ ID NO: 1092 - protein, 15 aa, synthetic construct
  REGION 1..15: note = Synthetic
GDSSITTRSRLLDRL

SEQ ID NO: 1093 - protein, 20 aa, synthetic construct
  REGION 1..20: note = Synthetic
GDSSITTRSRLLDRLVRLIG

SEQ ID NO: 1094 - protein, 15 aa, synthetic construct
  REGION 1..15: note = Synthetic
GEDCHAPTYLPAEVD

SEQ ID NO: 1095 - protein, 15 aa, synthetic construct
  REGION 1..15: note = Synthetic
GELSTLESLMNLYQQ

SEQ ID NO: 1096 - protein, 20 aa, synthetic construct
  REGION 1..20: note = Synthetic
GELSTLESLMNLYQQMGKPA

SEQ ID NO: 1097 - protein, 12 aa, synthetic construct
  REGION 1..12: note = Synthetic
GEQARYLALLEA

SEQ ID NO: 1098 - protein, 6 aa, synthetic construct
  REGION 1..6: note = Synthetic
GEVWVT

SEQ ID NO: 1099 - protein, 8 aa, synthetic construct
  REGION 1..8: note = Synthetic
GEVWVTPV

SEQ ID NO: 1100 - protein, 14 aa, synthetic construct
  REGION 1..14: note = Synthetic
GEVWVTPVIGSQAR

SEQ ID NO: 1101 - protein, 15 aa, synthetic construct
  REGION 1..15: note = Synthetic
GEYGGVIKDGTPGGA

SEQ ID NO: 1102 - protein, 17 aa, synthetic construct
  REGION 1..17: note = Synthetic
GFLSGVGPMRLRHGADT

SEQ ID NO: 1103 - protein, 22 aa, synthetic construct
  REGION 1..22: note = Synthetic
GFRASDVETAEGGEIHELLRLQ

SEQ ID NO: 1104 - protein, 25 aa, synthetic construct
  REGION 1..25: note = Synthetic
GGAVPGGAVPGGAVPGGFGPGGFGP

SEQ ID NO: 1105 - protein, 25 aa, synthetic construct
  REGION 1..25: note = Synthetic
GGAVPGGAVPGGFGPGGFGPGGFGP

SEQ ID NO: 1106 - protein, 30 aa, synthetic construct
  REGION 1..30: note = Synthetic
GGAVPGGAVPGGFGPGGFGPGGFGPGGFGP

SEQ ID NO: 1107 - protein, 15 aa, synthetic construct
  REGION 1..15: note = Synthetic
GGHITHSGMVGMGVS

SEQ ID NO: 1108 - protein, 20 aa, synthetic construct
  REGION 1..20: note = Synthetic
GILESRGIKARITHVDTESY

SEQ ID NO: 1109 - protein, 17 aa, synthetic construct
  REGION 1..17: note = Synthetic
GITGETTTTEYSNARYV

SEQ ID NO: 1110 - protein, 13 aa, synthetic construct
  REGION 1..13: note = Synthetic
GKEDRRVKQSRGE

SEQ ID NO: 1111 - protein, 7 aa, synthetic construct
  REGION 1..7: note = Synthetic
GKVTNGS

SEQ ID NO: 1112 - protein, 15 aa, synthetic construct
  REGION 1..15: note = Synthetic
GLGAWVPAAPCARIW

SEQ ID NO: 1113 - protein, 15 aa, synthetic construct
  REGION 1..15: note = Synthetic
GLIGIPALICCCRGR

SEQ ID NO: 1114 - protein, 20 aa, synthetic construct
  REGION 1..20: note = Synthetic
GLLACCAKCLYYLRGAIAPR

SEQ ID NO: 1115 - protein, 15 aa, synthetic construct
  REGION 1..15: note = Synthetic
GLLAIAGIRLHRAAI

SEQ ID NO: 1116 - protein, 16 aa, synthetic construct
  REGION 1..16: note = Synthetic
GLQPRADMAAPPTLPQ

SEQ ID NO: 1117 - protein, 17 aa, synthetic construct
  REGION 1..17: note = Synthetic
GMGVSCTVTREDGTNRR

SEQ ID NO: 1118 - protein, 12 aa, synthetic construct
  REGION 1..12: note = Synthetic
GMYGGTYLVEKP

SEQ ID NO: 1119 - protein, 28 aa, synthetic construct
  REGION 1..28: note = Synthetic
GNAELQTYLRQITPGWSIYGLYDGTYLG

SEQ ID NO: 1120 - protein, 15 aa, synthetic construct
  REGION 1..15: note = Synthetic
GNCHLTVNGEDVGAV

SEQ ID NO: 1121 - protein, 13 aa, synthetic construct
  REGION 1..13: note = Synthetic
GNNDNVLDHLTGR

SEQ ID NO: 1122 - protein, 15 aa, synthetic construct
  REGION 1..15: note = Synthetic
GNNDNVLDHLTGRSC

SEQ ID NO: 1123 - protein, 15 aa, synthetic construct
  REGION 1..15: note = Synthetic
GNRFILSQGNLIANC

SEQ ID NO: 1124 - protein, 34 aa, synthetic construct
  REGION 1..34: note = Synthetic
GNRGRGQRRDWSRAPPPPEERQETRSQTPAPKPS

SEQ ID NO: 1125 - protein, 8 aa, synthetic construct
  REGION 1..8: note = Synthetic
GPGEVWVT

SEQ ID NO: 1126 - protein, 17 aa, synthetic construct
  REGION 1..17: note = Synthetic
GPMRLRHGADTRCGRLI

SEQ ID NO: 1127 - protein, 7 aa, synthetic construct
  REGION 1..7: note = Synthetic
GPNHTKV

SEQ ID NO: 1128 - protein, 9 aa, synthetic construct
  REGION 1..9: note = Synthetic
GPRQAQVSF

SEQ ID NO: 1129 - protein, 15 aa, synthetic construct
  REGION 1..15: note = Synthetic
GPRQAQVSFLQGDQS

SEQ ID NO: 1130 - protein, 20 aa, synthetic construct
  REGION 1..20: note = Synthetic
GPRQAQVSFLQGDQSENELP

SEQ ID NO: 1131 - protein, 15 aa, synthetic construct
  REGION 1..15: note = Synthetic
GRGYNVSSIVTMTSQ

SEQ ID NO: 1132 - protein, 7 aa, synthetic construct
  REGION 1..7: note = Synthetic
GRTPFII

SEQ ID NO: 1133 - protein, 15 aa, synthetic construct
  REGION 1..15: note = Synthetic
GSPNCHGPDWASPVC

SEQ ID NO: 1134 - protein, 15 aa, synthetic construct
  REGION 1..15: note = Synthetic
GSQARKCGLHIRAGP

SEQ ID NO: 1135 - protein, 15 aa, synthetic construct
  REGION 1..15: note = Synthetic
GSSNSAFVSTSSSRR

SEQ ID NO: 1136 - protein, 15 aa, synthetic construct
  REGION 1..15: note = Synthetic
GSTKSCARTLVSGSF

SEQ ID NO: 1137 - protein, 15 aa, synthetic construct
  REGION 1..15: note = Synthetic
GSYYKQYHPTACEVE

SEQ ID NO: 1138 - protein, 15 aa, synthetic construct
  REGION 1..15: note = Synthetic
GTHTTAVSETRQTWA

SEQ ID NO: 1139 - protein, 15 aa, synthetic construct
  REGION 1..15: note = Synthetic
GTIINQDPDKILTYI

SEQ ID NO: 1140 - protein, 11 aa, synthetic construct
  REGION 1..11: note = Synthetic
GTLVRMAPVIG

SEQ ID NO: 1141 - protein, 13 aa, synthetic construct
  REGION 1..13: note = Synthetic
GTPLDIDTASESS

SEQ ID NO: 1142 - protein, 28 aa, synthetic construct
  REGION 1..28: note = Synthetic
GTYLGQAYGGIIKDAPPGAGFIYRETFC

SEQ ID NO: 1143 - protein, 17 aa, synthetic construct
  REGION 1..17: note = Synthetic
GVATKGLGVHAKSSDWG

SEQ ID NO: 1144 - protein, 20 aa, synthetic construct
  REGION 1..20: note = Synthetic
GVLLPTIPGKLDVNKSKTHI

SEQ ID NO: 1145 - protein, 15 aa, synthetic construct
  REGION 1..15: note = Synthetic
GVLSVDLSLTVELKI

SEQ ID NO: 1146 - protein, 15 aa, synthetic construct
  REGION 1..15: note = Synthetic
GVPIELQVECFTWDQ

SEQ ID NO: 1147 - protein, 15 aa, synthetic construct
  REGION 1..15: note = Synthetic
GVSCTVTREDGTNRR

SEQ ID NO: 1148 - protein, 15 aa, synthetic construct
  REGION 1..15: note = Synthetic
GVSYNIGSQEWYTTV

SEQ ID NO: 1149 - protein, 15 aa, synthetic construct
  REGION 1..15: note = Synthetic
GYNVSSIVTMTSQGM

SEQ ID NO: 1150 - protein, 15 aa, synthetic construct
  REGION 1..15: note = Synthetic
HFCVLADSESGGHIT

SEQ ID NO: 1151 - protein, 15 aa, synthetic construct
  REGION 1..15: note = Synthetic
HGEDSITIPYQGSGK

SEQ ID NO: 1152 - protein, 8 aa, synthetic construct
  REGION 1..8: note = Synthetic
HGPDWASP

SEQ ID NO: 1153 - protein, 15 aa, synthetic construct
  REGION 1..15: note = Synthetic
HGPDWASPVCQRHSP

SEQ ID NO: 1154 - protein, 22 aa, synthetic construct
  REGION 1..22: note = Synthetic
HGPDWASPVCQRHSPDCSRLVG

SEQ ID NO: 1155 - protein, 33 aa, synthetic construct
  REGION 1..33: note = Synthetic
HGPDWASPVCQRHSPDCSRLVGATPERPRLRLV

SEQ ID NO: 1156 - protein, 15 aa, synthetic construct
  REGION 1..15: note = Synthetic
HITHSGMEGMGVSCT

SEQ ID NO: 1157 - protein, 15 aa, synthetic construct
  REGION 1..15: note = Synthetic
HKSLSTNLDVTNSIE

SEQ ID NO: 1158 - protein, 9 aa, synthetic construct
  REGION 1..9: note = Synthetic
HLMIDRPYV

SEQ ID NO: 1159 - protein, 13 aa, synthetic construct
  REGION 1..13: note = Synthetic
HLPTGTPLDIDTA

SEQ ID NO: 1160 - protein, 24 aa, synthetic construct
  REGION 1..24: note = Synthetic
HLPTGTPLDIDTATESSQDPQDSR

SEQ ID NO: 1161 - protein, 15 aa, synthetic construct
  REGION 1..15: note = Synthetic
HMTNYLEQPVSNDLS

SEQ ID NO: 1162 - protein, 15 aa, synthetic construct
  REGION 1..15: note = Synthetic
HQSLVIKLMPNITLL

SEQ ID NO: 1163 - protein, 15 aa, synthetic construct
  REGION 1..15: note = Synthetic
HRAAIYTAEIHKSLS

SEQ ID NO: 1164 - protein, 18 aa, synthetic construct
  REGION 1..18: note = Synthetic
HRMQEAVEAERAGRGTGH

SEQ ID NO: 1165 - protein, 15 aa, synthetic construct
  REGION 1..15: note = Synthetic
HVDTESYFIVLSIAY

SEQ ID NO: 1166 - protein, 15 aa, synthetic construct
  REGION 1..15: note = Synthetic
HWGNLSKIGVVGIGS

SEQ ID NO: 1167 - protein, 15 aa, synthetic construct
  REGION 1..15: note = Synthetic
HWWQLTLGATCALPL

SEQ ID NO: 1168 - protein, 23 aa, synthetic construct
  REGION 1..23: note = Synthetic
HYRNASDVLPGHWLQGGWGCYNL

SEQ ID NO: 1169 - protein, 15 aa, synthetic construct
  REGION 1..15: note = Synthetic
IDLGPPISLERLDVG

SEQ ID NO: 1170 - protein, 15 aa, synthetic construct
  REGION 1..15: note = Synthetic
IEAIRQAGQEMILAV

SEQ ID NO: 1171 - protein, 9 aa, synthetic construct
  REGION 1..9: note = Synthetic
IETRSARHP

SEQ ID NO: 1172 - protein, 15 aa, synthetic construct
  REGION 1..15: note = Synthetic
IGSQEWYTTVPKYVA

SEQ ID NO: 1173 - protein, 15 aa, synthetic construct
  REGION 1..15: note = Synthetic
IKGVIVHRLEGVSYN

SEQ ID NO: 1174 - protein, 15 aa, synthetic construct
  REGION 1..15: note = Synthetic
IKHIIIVPIPGDSSI

SEQ ID NO: 1175 - protein, 20 aa, synthetic construct
  REGION 1..20: note = Synthetic
IKHIIIVPIPGDSSITTRSR

SEQ ID NO: 1176 - protein, 7 aa, synthetic construct
  REGION 1..7: note = Synthetic
IKLKDCP

SEQ ID NO: 1177 - protein, 15 aa, synthetic construct
  REGION 1..15: note = Synthetic
IKLMPNITLLNNCTR

SEQ ID NO: 1178 - protein, 10 aa, synthetic construct
  REGION 1..10: note = Synthetic
ILLERLDVGT

SEQ ID NO: 1179 - protein, 10 aa, synthetic construct
  REGION 1..10: note = Synthetic
ILPGQDLQYV

SEQ ID NO: 1180 - protein, 15 aa, synthetic construct
  REGION 1..15: note = Synthetic
ILTYIAADHCPVVEV

SEQ ID NO: 1181 - protein, 11 aa, synthetic construct
  REGION 1..11: note = Synthetic
INQDPDKILTY

SEQ ID NO: 1182 - protein, 15 aa, synthetic construct
  REGION 1..15: note = Synthetic
IPRFKVSPYLFNVPI

SEQ ID NO: 1183 - protein, 15 aa, synthetic construct
  REGION 1..15: note = Synthetic
IQALSYALGGDINKV

SEQ ID NO: 1184 - protein, 15 aa, synthetic construct
  REGION 1..15: note = Synthetic
IRAGPYGHATVEMPE

SEQ ID NO: 1185 - protein, 7 aa, synthetic construct
  REGION 1..7: note = Synthetic
IRMGTDK

SEQ ID NO: 1186 - protein, 15 aa, synthetic construct
  REGION 1..15: note = Synthetic
ISNFDESSCTFMPEG

SEQ ID NO: 1187 - protein, 15 aa, synthetic construct
  REGION 1..15: note = Synthetic
ITAGIALHQSMLNSQ

SEQ ID NO: 1188 - protein, 15 aa, synthetic construct
  REGION 1..15: note = Synthetic
ITDDPDVSIRLLEVV

SEQ ID NO: 1189 - protein, 20 aa, synthetic construct
  REGION 1..20: note = Synthetic
ITDDPDVSIRLLEVVQSDQS

SEQ ID NO: 1190 - protein, 5 aa, synthetic construct
  REGION 1..5: note = Synthetic
ITTYV

SEQ ID NO: 1191 - protein, 15 aa, synthetic construct
  REGION 1..15: note = Synthetic
IVEAGLASFILTIKF

SEQ ID NO: 1192 - protein, 20 aa, synthetic construct
  REGION 1..20: note = Synthetic
IVEAGLASFILTIKFGIETM

SEQ ID NO: 1193 - protein, 25 aa, synthetic construct
  REGION 1..25: note = Synthetic
IVEAGLASFILTIKFGIETMYPALG

SEQ ID NO: 1194 - protein, 16 aa, synthetic construct
  REGION 1..16: note = Synthetic
KALEAQSRALRAELAA

SEQ ID NO: 1195 - protein, 15 aa, synthetic construct
  REGION 1..15: note = Synthetic
KARITHVDTESYFIV

SEQ ID NO: 1196 - protein, 15 aa, synthetic construct
  REGION 1..15: note = Synthetic
KCGLHIRAGPYGHAT

SEQ ID NO: 1197 - protein, 15 aa, synthetic construct
  REGION 1..15: note = Synthetic
KCYTTGTIINQDPDK

SEQ ID NO: 1198 - protein, 10 aa, synthetic construct
  REGION 1..10: note = Synthetic
KDNPHPKGSR

SEQ ID NO: 1199 - protein, 15 aa, synthetic construct
  REGION 1..15: note = Synthetic
KDNRIPSYGVLSVDL

SEQ ID NO: 1200 - protein, 15 aa, synthetic construct
  REGION 1..15: note = Synthetic
KFLNPDREYDFRDLT

SEQ ID NO: 1201 - protein, 9 aa, synthetic construct
  REGION 1..9: note = Synthetic
KFVTAALLN

SEQ ID NO: 1202 - protein, 11 aa, synthetic construct
  REGION 1..11: note = Synthetic
KGNCSGPTTIR

SEQ ID NO: 1203 - protein, 15 aa, synthetic construct
  REGION 1..15: note = Synthetic
KIKFLNPDREYDFRD

SEQ ID NO: 1204 - protein, 15 aa, synthetic construct
  REGION 1..15: note = Synthetic
KIVDGGCFAPWDLEA

SEQ ID NO: 1205 - protein, 15 aa, synthetic construct
  REGION 1..15: note = Synthetic
KLGLKLLRYYTEILS

SEQ ID NO: 1206 - protein, 15 aa, synthetic construct
  REGION 1..15: note = Synthetic
KLGVWKSPTDMQSWV

SEQ ID NO: 1207 - protein, 7 aa, synthetic construct
  REGION 1..7: note = Synthetic
KLKECPQ

SEQ ID NO: 1208 - protein, 9 aa, synthetic construct
  REGION 1..9: note = Synthetic
KLLRYYTEI

SEQ ID NO: 1209 - protein, 10 aa, synthetic construct
  REGION 1..10: note = Synthetic
KLMPFSGDFV

SEQ ID NO: 1210 - protein, 9 aa, synthetic construct
  REGION 1..9: note = Synthetic
KLMPNITLL

SEQ ID NO: 1211 - protein, 26 aa, synthetic construct
  REGION 1..26: note = Synthetic
KLRMETCFQQACKGKIQALCENPEWA

SEQ ID NO: 1212 - protein, 9 aa, synthetic construct
  REGION 1..9: note = Synthetic
KLWCRHFCV

SEQ ID NO: 1213 - protein, 10 aa, synthetic construct
  REGION 1..10: note = Synthetic
KLWCRHFCVL

SEQ ID NO: 1214 - protein, 9 aa, synthetic construct
  REGION 1..9: note = Synthetic
KLWESPQEI

SEQ ID NO: 1215 - protein, 9 aa, synthetic construct
  REGION 1..9: note = Synthetic
KMSSAVGFV

SEQ ID NO: 1216 - protein, 17 aa, synthetic construct
  REGION 1..17: note = Synthetic
KMSSAVGFVPDTGPASR

SEQ ID NO: 1217 - protein, 7 aa, synthetic construct
  REGION 1..7: note = Synthetic
KMVYATN

SEQ ID NO: 1218 - protein, 15 aa, synthetic construct
  REGION 1..15: note = Synthetic
KPDLTGTSKSYVRSL

SEQ ID NO: 1219 - protein, 15 aa, synthetic construct
  REGION 1..15: note = Synthetic
KPNLSSKRSELSQLS

SEQ ID NO: 1220 - protein, 20 aa, synthetic construct
  REGION 1..20: note = Synthetic
KPNLSSKRSELSQLSMYRVF

SEQ ID NO: 1221 - protein, 15 aa, synthetic construct
  REGION 1..15: note = Synthetic
KQSRGEARESYRETG

SEQ ID NO: 1222 - protein, 20 aa, synthetic construct
  REGION 1..20: note = Synthetic
KQSRGEARESYRETGPSRAS

SEQ ID NO: 1223 - protein, 15 aa, synthetic construct
  REGION 1..15: note = Synthetic
KRFAGVVLAGAALGV

SEQ ID NO: 1224 - protein, 15 aa, synthetic construct
  REGION 1..15: note = Synthetic
KRTPGNKPRIAEMIC

SEQ ID NO: 1225 - protein, 20 aa, synthetic construct
  REGION 1..20: note = Synthetic
KRTPGNKPRIAEMICDIDTY

SEQ ID NO: 1226 - protein, 26 aa, synthetic construct
  REGION 1..26: note = Synthetic
KSNHNNVYWLTIPPMKNLALGVINTL

SEQ ID NO: 1227 - protein, 9 aa, synthetic construct
  REGION 1..9: note = Synthetic
KVSPYLFNV

SEQ ID NO: 1228 - protein, 17 aa, synthetic construct
  REGION 1..17: note = Synthetic
KVVQLPKISKNALKANG

SEQ ID NO: 1229 - protein, 17 aa, synthetic construct
  REGION 1..17: note = Synthetic
KVVQLPKISKNALRNDG

SEQ ID NO: 1230 - protein, 12 aa, synthetic construct
  REGION 1..12: note = Synthetic
LAHRRIPPENIR

SEQ ID NO: 1231 - protein, 12 aa, synthetic construct
  REGION 1..12: note = Synthetic
LALALWAGFALS

SEQ ID NO: 1232 - protein, 15 aa, synthetic construct
  REGION 1..15: note = Synthetic
LAPGGGNCHLTVNGE

SEQ ID NO: 1233 - protein, 15 aa, synthetic construct
  REGION 1..15: note = Synthetic
LAQIWVLLAKAVTAP

SEQ ID NO: 1234 - protein, 20 aa, synthetic construct
  REGION 1..20: note = Synthetic
LAQIWVLLAKAVTAPDTAAD

SEQ ID NO: 1235 - protein, 29 aa, synthetic construct
  REGION 1..29: note = Synthetic
LASYFNPGGSYYKQYHPTACEVEPAFGHS

SEQ ID NO: 1236 - protein, 15 aa, synthetic construct
  REGION 1..15: note = Synthetic
LAVSKGNCSGPTTIR

SEQ ID NO: 1237 - protein, 15 aa, synthetic construct
  REGION 1..15: note = Synthetic
LCENPEWAPLKDNRI

SEQ ID NO: 1238 - protein, 9 aa, synthetic construct
  REGION 1..9: note = Synthetic
LDRLVRLIG

SEQ ID NO: 1239 - protein, 9 aa, synthetic construct
  REGION 1..9: note = Synthetic
LEEEGVTPL

SEQ ID NO: 1240 - protein, 22 aa, synthetic construct
  REGION 1..22: note = Synthetic
LEHRMQEAVEAERAGRGTGHFI

SEQ ID NO: 1241 - protein, 15 aa, synthetic construct
  REGION 1..15: note = Synthetic
LEKLGYSGGDLLGIL

SEQ ID NO: 1242 - protein, 10 aa, synthetic construct
  REGION 1..10: note = Synthetic
LEQPVSNDLS

SEQ ID NO: 1243 - protein, 15 aa, synthetic construct
  REGION 1..15: note = Synthetic
LERKWLDVVRNIIAE

SEQ ID NO: 1244 - protein, 20 aa, synthetic construct
  REGION 1..20: note = Synthetic
LERKWLDVVRNIIAEDLSLR

SEQ ID NO: 1245 - protein, 15 aa, synthetic construct
  REGION 1..15: note = Synthetic
LFGPSLRDPISAEIS

SEQ ID NO: 1246 - protein, 15 aa, synthetic construct
  REGION 1..15: note = Synthetic
LGELKLAALCHGEDS

SEQ ID NO: 1247 - protein, 13 aa, synthetic construct
  REGION 1..13: note = Synthetic
LGGKEDRRVKQSR

SEQ ID NO: 1248 - protein, 24 aa, synthetic construct
  REGION 1..24: note = Synthetic
LGHDGHHGGTLRVGQHHRNASDVL

SEQ ID NO: 1249 - protein, 20 aa, synthetic construct
  REGION 1..20: note = Synthetic
LGSPNCHGPDWASPVCQRHS

SEQ ID NO: 1250 - protein, 27 aa, synthetic construct
  REGION 1..27: note = Synthetic
LGSPNCHGPDWASPVCQRHSPDCSRLV

SEQ ID NO: 1251 - protein, 18 aa, synthetic construct
  REGION 1..18: note = Synthetic
LHDPDTEAPTEACVTSWL

SEQ ID NO: 1252 - protein, 15 aa, synthetic construct
  REGION 1..15: note = Synthetic
LIANCASILCKCYTT

SEQ ID NO: 1253 - protein, 24 aa, synthetic construct
  REGION 1..24: note = Synthetic
LIGLLAIAGIRLHRAAIYTAEIHK

SEQ ID NO: 1254 - protein, 15 aa, synthetic construct
  REGION 1..15: note = Synthetic
LIPSMNQLSCDLIGQ

SEQ ID NO: 1255 - protein, 15 aa, synthetic construct
  REGION 1..15: note = Synthetic
LKIKIASGFGPLITH

SEQ ID NO: 1256 - protein, 23 aa, synthetic construct
  REGION 1..23: note = Synthetic
LKIKIASGFGPLITHGSGMDLYK

SEQ ID NO: 1257 - protein, 7 aa, synthetic construct
  REGION 1..7: note = Synthetic
LKLYFEP

SEQ ID NO: 1258 - protein, 10 aa, synthetic construct
  REGION 1..10: note = Synthetic
LLAVLFVMFL

SEQ ID NO: 1259 - protein, 15 aa, synthetic construct
  REGION 1..15: note = Synthetic
LLDRLVRLIGNPDVS

SEQ ID NO: 1260 - protein, 20 aa, synthetic construct
  REGION 1..20: note = Synthetic
LLDRLVRLIGNPDVSGPKLT

SEQ ID NO: 1261 - protein, 15 aa, synthetic construct
  REGION 1..15: note = Synthetic
LLESSDQILRSMKGL

SEQ ID NO: 1262 - protein, 15 aa, synthetic construct
  REGION 1..15: note = Synthetic
LLETRTTNQFLAVSK

SEQ ID NO: 1263 - protein, 15 aa, synthetic construct
  REGION 1..15: note = Synthetic
LLEVVQSDQSQSGLT

SEQ ID NO: 1264 - protein, 19 aa, synthetic construct
  REGION 1..19: note = Synthetic
LLEVVQSDQSQSGLTFASR

SEQ ID NO: 1265 - protein, 20 aa, synthetic construct
  REGION 1..20: note = Synthetic
LLEVVQSDQSQSGLTFASRG

SEQ ID NO: 1266 - protein, 15 aa, synthetic construct
  REGION 1..15: note = Synthetic
LLGILESRGIKARIT

SEQ ID NO: 1267 - protein, 8 aa, synthetic construct
  REGION 1..8: note = Synthetic
LLRTAPGP

SEQ ID NO: 1268 - protein, 15 aa, synthetic construct
  REGION 1..15: note = Synthetic
LLRYYTEILSLFGPS

SEQ ID NO: 1269 - protein, 20 aa, synthetic construct
  REGION 1..20: note = Synthetic
LLVPWVLIFMVCRRACRRRG

SEQ ID NO: 1270 - protein, 10 aa, synthetic construct
  REGION 1..10: note = Synthetic
LLWRSRCKIV

SEQ ID NO: 1271 - protein, 9 aa, synthetic construct
  REGION 1..9: note = Synthetic
LLWSYAMGV

SEQ ID NO: 1272 - protein, 15 aa, synthetic construct
  REGION 1..15: note = Synthetic
LLWSYAMGVGVELEN

SEQ ID NO: 1273 - protein, 20 aa, synthetic construct
  REGION 1..20: note = Synthetic
LLWSYAMGVGVELENSMGGL

SEQ ID NO: 1274 - protein, 9 aa, synthetic construct
  REGION 1..9: note = Synthetic
LMIDRPYVL

SEQ ID NO: 1275 - protein, 15 aa, synthetic construct
  REGION 1..15: note = Synthetic
LNAMTQNIRPVQSVA

SEQ ID NO: 1276 - protein, 15 aa, synthetic construct
  REGION 1..15: note = Synthetic
LNTPPPYQVSCGGES

SEQ ID NO: 1277 - protein, 15 aa, synthetic construct
  REGION 1..15: note = Synthetic
LRDPISAEISIQALS

SEQ ID NO: 1278 - protein, 16 aa, synthetic construct
  REGION 1..16: note = Synthetic
LRGSGDLQEYLRHVTR

SEQ ID NO: 1279 - protein, 8 aa, synthetic construct
  REGION 1..8: note = Synthetic
LRLVDADD

SEQ ID NO: 1280 - protein, 12 aa, synthetic construct
  REGION 1..12: note = Synthetic
LRLVDADDPLLR

SEQ ID NO: 1281 - protein, 31 aa, synthetic construct
  REGION 1..31: note = Synthetic
LRLVDADDPLLRTAPGPGEVWVTPVIGSQAR

SEQ ID NO: 1282 - protein, 28 aa, synthetic construct
  REGION 1..28: note = Synthetic
LRRLLYMIYMSGLAVRVHVSKEEQYYDY

SEQ ID NO: 1283 - protein, 8 aa, synthetic construct
  REGION 1..8: note = Synthetic
LRTAPGPG

SEQ ID NO: 1284 - protein, 20 aa, synthetic construct
  REGION 1..20: note = Synthetic
LRVGQHYRNASDVLPGHWLQ

SEQ ID NO: 1285 - protein, 5 aa, synthetic construct
  REGION 1..5: note = Synthetic
LRYLA

SEQ ID NO: 1286 - protein, 13 aa, synthetic construct
  REGION 1..13: note = Synthetic
LSCKPWQESRKNK

SEQ ID NO: 1287 - protein, 15 aa, synthetic construct
  REGION 1..15: note = Synthetic
LSEIKGVIVHRLEGV

SEQ ID NO: 1288 - protein, 15 aa, synthetic construct
  REGION 1..15: note = Synthetic
LSIAYPTLSEIKGVI

SEQ ID NO: 1289 - protein, 15 aa, synthetic construct
  REGION 1..15: note = Synthetic
LSLLDLYLGRGYNVS

SEQ ID NO: 1290 - protein, 15 aa, synthetic construct
  REGION 1..15: note = Synthetic
LSQGNLIANCASILC

SEQ ID NO: 1291 - protein, 15 aa, synthetic construct
  REGION 1..15: note = Synthetic
LSSHRGVIADNQAKW

SEQ ID NO: 1292 - protein, 15 aa, synthetic construct
  REGION 1..15: note = Synthetic
LSVDLSLTVELKIKI

SEQ ID NO: 1293 - protein, 14 aa, synthetic construct
  REGION 1..14: note = Synthetic
LTGISICNPGSSLC

SEQ ID NO: 1294 - protein, 15 aa, synthetic construct
  REGION 1..15: note = Synthetic
LTIKFGIETMYPALG

SEQ ID NO: 1295 - protein, 20 aa, synthetic construct
  REGION 1..20: note = Synthetic
LTIKFGIETMYPALGLHEFA

SEQ ID NO: 1296 - protein, 15 aa, synthetic construct
  REGION 1..15: note = Synthetic
LTLQTPTGQIHWGNL

SEQ ID NO: 1297 - protein, 8 aa, synthetic construct
  REGION 1..8: note = Synthetic
LVDADDPL

SEQ ID NO: 1298 - protein, 10 aa, synthetic construct
  REGION 1..10: note = Synthetic
LVDADDPLLR

SEQ ID NO: 1299 - protein, 15 aa, synthetic construct
  REGION 1..15: note = Synthetic
LVEKPNLSSKRSELS

SEQ ID NO: 1300 - protein, 7 aa, synthetic construct
  REGION 1..7: note = Synthetic
LVGATPE

SEQ ID NO: 1301 - protein, 8 aa, synthetic construct
  REGION 1..8: note = Synthetic
LVGATPER

SEQ ID NO: 1302 - protein, 15 aa, synthetic construct
  REGION 1..15: note = Synthetic
LVKLGVWKSPTGMQS

SEQ ID NO: 1303 - protein, 18 aa, synthetic construct
  REGION 1..18: note = Synthetic
LVSGSFGNRFILSQGNLI

SEQ ID NO: 1304 - protein, 15 aa, synthetic construct
  REGION 1..15: note = Synthetic
LYKSNHNNVYWLTIP

SEQ ID NO: 1305 - protein, 25 aa, synthetic construct
  REGION 1..25: note = Synthetic
LYPMSPLLQECLRGSTKSCARTLVS

SEQ ID NO: 1306 - protein, 18 aa, synthetic construct
  REGION 1..18: note = Synthetic
MASTTPITMEDLQKALEA

SEQ ID NO: 1307 - protein, 21 aa, synthetic construct
  REGION 1..21: note = Synthetic
MASTTPITMEDLQKALEAQSR

SEQ ID NO: 1308 - protein, 29 aa, synthetic construct
  REGION 1..29: note = Synthetic
MASTTPITMEDLQKALEAQSRALRAELAA

SEQ ID NO: 1309 - protein, 29 aa, synthetic construct
  REGION 1..29: note = Synthetic
MASTTPITMEDLQKALEAQSRALRAGLAA

SEQ ID NO: 1310 - protein, 29 aa, synthetic construct
  REGION 1..29: note = Synthetic
MASTTPITMEDLQKALETQSRVLRAGLTA

SEQ ID NO: 1311 - protein, 15 aa, synthetic construct
  REGION 1..15: note = Synthetic
MATLLRSLALFKRNK

SEQ ID NO: 1312 - protein, 20 aa, synthetic construct
  REGION 1..20: note = Synthetic
MATLLRSLALFKRNKDKPPI

SEQ ID NO: 1313 - protein, 15 aa, synthetic construct
  REGION 1..15: note = Synthetic
MDLYKSNHNNVYWLT

SEQ ID NO: 1314 - protein, 14 aa, synthetic construct
  REGION 1..14: note = Synthetic
MEDLQKALEAQSRA

SEQ ID NO: 1315 - protein, 21 aa, synthetic construct
  REGION 1..21: note = Synthetic
MEDLQKALEAQSRALRAELAA

SEQ ID NO: 1316 - protein, 15 aa, synthetic construct
  REGION 1..15: note = Synthetic
MGLKVNVSAIFMAVL

SEQ ID NO: 1317 - protein, 15 aa, synthetic construct
  REGION 1..15: note = Synthetic
MIDRPYVLLAVLFVM

SEQ ID NO: 1318 - protein, 15 aa, synthetic construct
  REGION 1..15: note = Synthetic
MILAVQGVQDYINNE

SEQ ID NO: 1319 - protein, 15 aa, synthetic construct
  REGION 1..15: note = Synthetic
MLNSQAIDNLRASLE

SEQ ID NO: 1320 - protein, 15 aa, synthetic construct
  REGION 1..15: note = Synthetic
MNALVNSTLLETRTT

SEQ ID NO: 1321 - protein, 32 aa, synthetic construct
  REGION 1..32: note = Synthetic
MNYTGNQQSRWGLGSPNCHGPDWASPVCQRHS

SEQ ID NO: 1322 - protein, 15 aa, synthetic construct
  REGION 1..15: note = Synthetic
MQSWVPLSTDDPVID

SEQ ID NO: 1323 - protein, 15 aa, synthetic construct
  REGION 1..15: note = Synthetic
MSLSLLDLYLGRGYN

SEQ ID NO: 1324 - protein, 15 aa, synthetic construct
  REGION 1..15: note = Synthetic
MSPLLQECLRGSTKS

SEQ ID NO: 1325 - protein, 15 aa, synthetic construct
  REGION 1..15: note = Synthetic
MSPQRDRINAFYKDN

SEQ ID NO: 1326 - protein, 15 aa, synthetic construct
  REGION 1..15: note = Synthetic
MYRVFEVSVIRNPGL

SEQ ID NO: 1327 - protein, 15 aa, synthetic construct
  REGION 1..15: note = Synthetic
NALYPMSPLLQECLR

SEQ ID NO: 1328 - protein, 26 aa, synthetic construct
  REGION 1..26: note = Synthetic
NCHGPDWASPVCQRHSPDCSRLVGAT

SEQ ID NO: 1329 - protein, 15 aa, synthetic construct
  REGION 1..15: note = Synthetic
NFGRSYFDPAYFRLG

SEQ ID NO: 1330 - protein, 20 aa, synthetic construct
  REGION 1..20: note = Synthetic
NFGRSYFDPAYFRLGQEMVR

SEQ ID NO: 1331 - protein, 15 aa, synthetic construct
  REGION 1..15: note = Synthetic
NGTQRACTFWAVNAY

SEQ ID NO: 1332 - protein, 15 aa, synthetic construct
  REGION 1..15: note = Synthetic
NGVTIQVGSRRYPDA

SEQ ID NO: 1333 - protein, 15 aa, synthetic construct
  REGION 1..15: note = Synthetic
NIIAEDLSLRRFMVA

SEQ ID NO: 1334 - protein, 20 aa, synthetic construct
  REGION 1..20: note = Synthetic
NIIAEDLSLRRFMVALILDI

SEQ ID NO: 1335 - protein, 15 aa, synthetic construct
  REGION 1..15: note = Synthetic
NITLLNNCTRVEIAE

SEQ ID NO: 1336 - protein, 15 aa, synthetic construct
  REGION 1..15: note = Synthetic
NLALGVINTLEWIPR

SEQ ID NO: 1337 - protein, 18 aa, synthetic construct
  REGION 1..18: note = Synthetic
NLFQVVHWSYNRPAYSPG

SEQ ID NO: 1338 - protein, 15 aa, synthetic construct
  REGION 1..15: note = Synthetic
NLVILPGQDLQYVLA

SEQ ID NO: 1339 - protein, 15 aa, synthetic construct
  REGION 1..15: note = Synthetic
NLYQQMGKPAPYMVN

SEQ ID NO: 1340 - protein, 20 aa, synthetic construct
  REGION 1..20: note = Synthetic
NLYQQMGKPAPYMVNLENSI

SEQ ID NO: 1341 - protein, 15 aa, synthetic construct
  REGION 1..15: note = Synthetic
NNCTRVEIAEYRRLL

SEQ ID NO: 1342 - protein, 10 aa, synthetic construct
  REGION 1..10: note = Synthetic
NPDREYDFRD

SEQ ID NO: 1343 - protein, 9 aa, synthetic construct
  REGION 1..9: note = Synthetic
NPDVSGPKL

SEQ ID NO: 1344 - protein, 15 aa, synthetic construct
  REGION 1..15: note = Synthetic
NPDVSGPKLTGALIG

SEQ ID NO: 1345 - protein, 20 aa, synthetic construct
  REGION 1..20: note = Synthetic
NPDVSGPKLTGALIGILSLF

SEQ ID NO: 1346 - protein, 15 aa, synthetic construct
  REGION 1..15: note = Synthetic
NPPERIKLDYDQYCA

SEQ ID NO: 1347 - protein, 15 aa, synthetic construct
  REGION 1..15: note = Synthetic
NQAKWAVPTTRTDDK

SEQ ID NO: 1348 - protein, 15 aa, synthetic construct
  REGION 1..15: note = Synthetic
NQDPDKILTYIAADH

SEQ ID NO: 1349 - protein, 15 aa, synthetic construct
  REGION 1..15: note = Synthetic
NQLSCDLIGQKLGLK

SEQ ID NO: 1350 - protein, 27 aa, synthetic construct
  REGION 1..27: note = Synthetic
NQQSRWGLGSPNCHGPDWASPVCQRHS

SEQ ID NO: 1351 - protein, 12 aa, synthetic construct
  REGION 1..12: note = Synthetic
NSTLGVKSAREF

SEQ ID NO: 1352 - protein, 15 aa, synthetic construct
  REGION 1..15: note = Synthetic
NTPHGQLEVQVPPDP

SEQ ID NO: 1353 - protein, 15 aa, synthetic construct
  REGION 1..15: note = Synthetic
NVSAIFMAVLLTLQT

SEQ ID NO: 1354 - protein, 15 aa, synthetic construct
  REGION 1..15: note = Synthetic
PAEVDGDVKLSSNLV

SEQ ID NO: 1355 - protein, 15 aa, synthetic construct
  REGION 1..15: note = Synthetic
PAFGHSDAACWGFPT

SEQ ID NO: 1356 - protein, 15 aa, synthetic construct
  REGION 1..15: note = Synthetic
PALICCCRGRCNKKG

SEQ ID NO: 1357 - protein, 13 aa, synthetic construct
  REGION 1..13: note = Synthetic
PDKILTYIAADHC

SEQ ID NO: 1358 - protein, 15 aa, synthetic construct
  REGION 1..15: note = Synthetic
PERIKLDYDQYCADV

SEQ ID NO: 1359 - protein, 8 aa, synthetic construct
  REGION 1..8: note = Synthetic
PERPRLRL

SEQ ID NO: 1360 - protein, 15 aa, synthetic construct
  REGION 1..15: note = Synthetic
PGCATQAPVPVRLAG

SEQ ID NO: 1361 - protein, 29 aa, synthetic construct
  REGION 1..29: note = Synthetic
PGCATQAPVPVRLAGVRFESKIVDGGCFA

SEQ ID NO: 1362 - protein, 8 aa, synthetic construct
  REGION 1..8: note = Synthetic
PGEVWVTP

SEQ ID NO: 1363 - protein, 15 aa, synthetic construct
  REGION 1..15: note = Synthetic
PGEVWVTPVIGSQAR

SEQ ID NO: 1364 - protein, 16 aa, synthetic construct
  REGION 1..16: note = Synthetic
PGKLDVNKSKTHISVN

SEQ ID NO: 1365 - protein, 15 aa, synthetic construct
  REGION 1..15: note = Synthetic
PGLGAPVFHMTNYLE

SEQ ID NO: 1366 - protein, 8 aa, synthetic construct
  REGION 1..8: note = Synthetic
PGPGEVWV

SEQ ID NO: 1367 - protein, 15 aa, synthetic construct
  REGION 1..15: note = Synthetic
PHKTVRVKFHTETRT

SEQ ID NO: 1368 - protein, 15 aa, synthetic construct
  REGION 1..15: note = Synthetic
PIELQVECFTWDQKL

SEQ ID NO: 1369 - protein, 10 aa, synthetic construct
  REGION 1..10: note = Synthetic
PISLERLDVG

SEQ ID NO: 1370 - protein, 15 aa, synthetic construct
  REGION 1..15: note = Synthetic
PISLERLDVGTNLGN

SEQ ID NO: 1371 - protein, 15 aa, synthetic construct
  REGION 1..15: note = Synthetic
PKALFTQQGGAYGRC

SEQ ID NO: 1372 - protein, 15 aa, synthetic construct
  REGION 1..15: note = Synthetic
PKYVATQGYLISNFD

SEQ ID NO: 1373 - protein, 13 aa, synthetic construct
  REGION 1..13: note = Synthetic
PLDIDTASESSQD

SEQ ID NO: 1374 - protein, 15 aa, synthetic construct
  REGION 1..15: note = Synthetic
PLGLKFKTVRPVALP

SEQ ID NO: 1375 - protein, 15 aa, synthetic construct
  REGION 1..15: note = Synthetic
PLITHGSGMDLYKSN

SEQ ID NO: 1376 - protein, 15 aa, synthetic construct
  REGION 1..15: note = Synthetic
PLKDNRIPSYGVLSV

SEQ ID NO: 1377 - protein, 8 aa, synthetic construct
  REGION 1..8: note = Synthetic
PLLRTAPG

SEQ ID NO: 1378 - protein, 13 aa, synthetic construct
  REGION 1..13: note = Synthetic
PLLSCKPWQESRK

SEQ ID NO: 1379 - protein, 14 aa, synthetic construct
  REGION 1..14: note = Synthetic
PPATVYRYDSRPPE

SEQ ID NO: 1380 - protein, 12 aa, synthetic construct
  REGION 1..12: note = Synthetic
PPISLERLDVGT

SEQ ID NO: 1381 - protein, 20 aa, synthetic construct
  REGION 1..20: note = Synthetic
PPPPEERQETRSQTPAPKPS

SEQ ID NO: 1382 - protein, 15 aa, synthetic construct
  REGION 1..15: note = Synthetic
PQEQITQHGSPYGRC

SEQ ID NO: 1383 - protein, 18 aa, synthetic construct
  REGION 1..18: note = Synthetic
PQEQITQHGSPYGRCANK

SEQ ID NO: 1384 - protein, 25 aa, synthetic construct
  REGION 1..25: note = Synthetic
PQPGPQPPQPPQPQPEAPAPQPPAG

SEQ ID NO: 1385 - protein, 13 aa, synthetic construct
  REGION 1..13: note = Synthetic
PRLGGKEDRRVKQ

SEQ ID NO: 1386 - protein, 8 aa, synthetic construct
  REGION 1..8: note = Synthetic
PRLRLVDA

SEQ ID NO: 1387 - protein, 15 aa, synthetic construct
  REGION 1..15: note = Synthetic
PRNVRVTGCYQCGTP

SEQ ID NO: 1388 - protein, 13 aa, synthetic construct
  REGION 1..13: note = Synthetic
PSRASDARAAHLP

SEQ ID NO: 1389 - protein, 15 aa, synthetic construct
  REGION 1..15: note = Synthetic
PTGQIHWGNLSKIGV

SEQ ID NO: 1390 - protein, 13 aa, synthetic construct
  REGION 1..13: note = Synthetic
PTGTPLDIDTASE

SEQ ID NO: 1391 - protein, 15 aa, synthetic construct
  REGION 1..15: note = Synthetic
PTLSEIKGVIVHRLE

SEQ ID NO: 1392 - protein, 15 aa, synthetic construct
  REGION 1..15: note = Synthetic
PTTIRGQFSNMSLSL

SEQ ID NO: 1393 - protein, 10 aa, synthetic construct
  REGION 1..10: note = Synthetic
PTTRTDDKLR

SEQ ID NO: 1394 - protein, 21 aa, synthetic construct
  REGION 1..21: note = Synthetic
PTTRTDDKLRMETCFQQACKG

SEQ ID NO: 1395 - protein, 15 aa, synthetic construct
  REGION 1..15: note = Synthetic
PVALPRTLAPPRNVR

SEQ ID NO: 1396 - protein, 19 aa, synthetic construct
  REGION 1..19: note = Synthetic
PVFAGANYAAWAVNVAQVI

SEQ ID NO: 1397 - protein, 8 aa, synthetic construct
  REGION 1..8: note = Synthetic
PVIGSQAR

SEQ ID NO: 1398 - protein, 15 aa, synthetic construct
  REGION 1..15: note = Synthetic
PVVEVNGVTIQVGSR

SEQ ID NO: 1399 - protein, 20 aa, synthetic construct
  REGION 1..20: note = Synthetic
PWELVVLTARPEDGWTCRGV

SEQ ID NO: 1400 - protein, 13 aa, synthetic construct
  REGION 1..13: note = Synthetic
PWQESRKNKAQTR

SEQ ID NO: 1401 - protein, 15 aa, synthetic construct
  REGION 1..15: note = Synthetic
PYMVNLENSIQNKFS

SEQ ID NO: 1402 - protein, 20 aa, synthetic construct
  REGION 1..20: note = Synthetic
PYMVNLENSIQNKFSAGSYP

SEQ ID NO: 1403 - protein, 10 aa, synthetic construct
  REGION 1..10: note = Synthetic
PYQGSGKGVS

SEQ ID NO: 1404 - protein, 15 aa, synthetic construct
  REGION 1..15: note = Synthetic
PYQVSCGGESDRASA

SEQ ID NO: 1405 - protein, 13 aa, synthetic construct
  REGION 1..13: note = Synthetic
QACKGKIQALCEN

SEQ ID NO: 1406 - protein, 15 aa, synthetic construct
  REGION 1..15: note = Synthetic
QAGQEMILAVQGVQD

SEQ ID NO: 1407 - protein, 15 aa, synthetic construct
  REGION 1..15: note = Synthetic
QALCENPECVPLKDN

SEQ ID NO: 1408 - protein, 7 aa, synthetic construct
  REGION 1..7: note = Synthetic
QALGALK

SEQ ID NO: 1409 - protein, 15 aa, synthetic construct
  REGION 1..15: note = Synthetic
QAPVPVRLAGVRFES

SEQ ID NO: 1410 - protein, 15 aa, synthetic construct
  REGION 1..15: note = Synthetic
QCGTPALVEGLAPGG

SEQ ID NO: 1411 - protein, 15 aa, synthetic construct
  REGION 1..15: note = Synthetic
QDPDKILTYIAADHC

SEQ ID NO: 1412 - protein, 15 aa, synthetic construct
  REGION 1..15: note = Synthetic
QECLRGSTKSCARTL

SEQ ID NO: 1413 - protein, 14 aa, synthetic construct
  REGION 1..14: note = Synthetic
QEQITQHGSPYGRC

SEQ ID NO: 1414 - protein, 13 aa, synthetic construct
  REGION 1..13: note = Synthetic
QESRKNKAQTRTP

SEQ ID NO: 1415 - protein, 15 aa, synthetic construct
  REGION 1..15: note = Synthetic
QGDQSENELPRLGGK

SEQ ID NO: 1416 - protein, 20 aa, synthetic construct
  REGION 1..20: note = Synthetic
QGDQSENELPRLGGKEDRRV

SEQ ID NO: 1417 - protein, 20 aa, synthetic construct
  REGION 1..20: note = Synthetic
QGESGHDIKITAENTPLPIA

SEQ ID NO: 1418 - protein, 15 aa, synthetic construct
  REGION 1..15: note = Synthetic
QGSGKGVSFQLVKLG

SEQ ID NO: 1419 - protein, 15 aa, synthetic construct
  REGION 1..15: note = Synthetic
QGVQDYINNELIPSM

SEQ ID NO: 1420 - protein, 15 aa, synthetic construct
  REGION 1..15: note = Synthetic
QLEVQVPPDPGDLVE

SEQ ID NO: 1421 - protein, 9 aa, synthetic construct
  REGION 1..9: note = Synthetic
QLPEATFMV

SEQ ID NO: 1422 - protein, 25 aa, synthetic construct
  REGION 1..25: note = Synthetic
QLPFLGHDGHHGGTLRVGQHYRNAS

SEQ ID NO: 1423 - protein, 10 aa, synthetic construct
  REGION 1..10: note = Synthetic
QLSMYRVFEV

SEQ ID NO: 1424 - protein, 6 aa, synthetic construct
  REGION 1..6: note = Synthetic
QLSNIT

SEQ ID NO: 1425 - protein, 15 aa, synthetic construct
  REGION 1..15: note = Synthetic
QNIRPVQSVASSRRH

SEQ ID NO: 1426 - protein, 15 aa, synthetic construct
  REGION 1..15: note = Synthetic
QNKFSAGSYPLLWSY

SEQ ID NO: 1427 - protein, 20 aa, synthetic construct
  REGION 1..20: note = Synthetic
QNKFSAGSYPLLWSYAMGVG

SEQ ID NO: 1428 - protein, 25 aa, synthetic construct
  REGION 1..25: note = Synthetic
QNKFSAGSYPLLWSYAMGVGVELEN

SEQ ID NO: 1429 - protein, 15 aa, synthetic construct
  REGION 1..15: note = Synthetic
QQACKGKIQALCENP

SEQ ID NO: 1430 - protein, 15 aa, synthetic construct
  REGION 1..15: note = Synthetic
QQRRVVGEFRLERKW

SEQ ID NO: 1431 - protein, 20 aa, synthetic construct
  REGION 1..20: note = Synthetic
QQRRVVGEFRLERKWLDVVR

SEQ ID NO: 1432 - protein, 18 aa, synthetic construct
  REGION 1..18: note = Synthetic
QQTRANPNPYTSRRSVAS

SEQ ID NO: 1433 - protein, 15 aa, synthetic construct
  REGION 1..15: note = Synthetic
QRHSPDCSRLVGATP

SEQ ID NO: 1434 - protein, 15 aa, synthetic construct
  REGION 1..15: note = Synthetic
QSGLTFASRGTNMED

SEQ ID NO: 1435 - protein, 20 aa, synthetic construct
  REGION 1..20: note = Synthetic
QSGLTFASRGTNMEDEADQY

SEQ ID NO: 1436 - protein, 20 aa, synthetic construct
  REGION 1..20: note = Synthetic
QSIALSSLMVAQAIPLVGEL

SEQ ID NO: 1437 - protein, 15 aa, synthetic construct
  REGION 1..15: note = Synthetic
QSRFGWFENKEISDI

SEQ ID NO: 1438 - protein, 20 aa, synthetic construct
  REGION 1..20: note = Synthetic
QSRFGWFENKEISDIEVQDP

SEQ ID NO: 1439 - protein, 7 aa, synthetic construct
  REGION 1..7: note = Synthetic
QSRGEAR

SEQ ID NO: 1440 - protein, 18 aa, synthetic construct
  REGION 1..18: note = Synthetic
QSRGEARESYRETGPSRA

SEQ ID NO: 1441 - protein, 18 aa, synthetic construct
  REGION 1..18: note = Synthetic
QTGRGGSAPRPELGPPTN

SEQ ID NO: 1442 - protein, 25 aa, synthetic construct
  REGION 1..25: note = Synthetic
QTPAPKPSRAPPQQPQPPRMQTGRG

SEQ ID NO: 1443 - protein, 15 aa, synthetic construct
  REGION 1..15: note = Synthetic
QVGSRRYPDAVYLHR

SEQ ID NO: 1444 - protein, 13 aa, synthetic construct
  REGION 1..13: note = Synthetic
QVSFLQGDQSENE

SEQ ID NO: 1445 - protein, 15 aa, synthetic construct
  REGION 1..15: note = Synthetic
QYHPTACEVEPAFGH

SEQ ID NO: 1446 - protein, 15 aa, synthetic construct
  REGION 1..15: note = Synthetic
QYVLATYDTSRVEHA

SEQ ID NO: 1447 - protein, 13 aa, synthetic construct
  REGION 1..13: note = Synthetic
RANPNPYTSRRSV

SEQ ID NO: 1448 - protein, 13 aa, synthetic construct
  REGION 1..13: note = Synthetic
RASDARAAHLPTG

SEQ ID NO: 1449 - protein, 15 aa, synthetic construct
  REGION 1..15: note = Synthetic
RASLETTNQAIEAIR

SEQ ID NO: 1450 - protein, 20 aa, synthetic construct
  REGION 1..20: note = Synthetic
RCGRLICGLSTTAQYPPTRF

SEQ ID NO: 1451 - protein, 19 aa, synthetic construct
  REGION 1..19: note = Synthetic
RDGQSVIGACASPYEGRYR

SEQ ID NO: 1452 - protein, 13 aa, synthetic construct
  REGION 1..13: note = Synthetic
RESYRETGPSRAS

SEQ ID NO: 1453 - protein, 13 aa, synthetic construct
  REGION 1..13: note = Synthetic
RETGPSRASDARA

SEQ ID NO: 1454 - protein, 14 aa, synthetic construct
  REGION 1..14: note = Synthetic
RFAKYQQQGRLEAR

SEQ ID NO: 1455 - protein, 24 aa, synthetic construct
  REGION 1..24: note = Synthetic
RFGAPQAFLAGLLLATVAVGTARA

SEQ ID NO: 1456 - protein, 15 aa, synthetic construct
  REGION 1..15: note = Synthetic
RFMVALILDIKRTPG

SEQ ID NO: 1457 - protein, 20 aa, synthetic construct
  REGION 1..20: note = Synthetic
RFMVALILDIKRTPGNKPRI

SEQ ID NO: 1458 - protein, 13 aa, synthetic construct
  REGION 1..13: note = Synthetic
RGEARESYRETGP

SEQ ID NO: 1459 - protein, 9 aa, synthetic construct
  REGION 1..9: note = Synthetic
RGTTPPAYG

SEQ ID NO: 1460 - protein, 9 aa, synthetic construct
  REGION 1..9: note = Synthetic
RIETRSARH

SEQ ID NO: 1461 - protein, 11 aa, synthetic construct
  REGION 1..11: note = Synthetic
RILAGALATYQ

SEQ ID NO: 1462 - protein, 11 aa, synthetic construct
  REGION 1..11: note = Synthetic
RIPPENIRRVT

SEQ ID NO: 1463 - protein, 7 aa, synthetic construct
  REGION 1..7: note = Synthetic
RISNLND

SEQ ID NO: 1464 - protein, 7 aa, synthetic construct
  REGION 1..7: note = Synthetic
RLANLNG

SEQ ID NO: 1465 - protein, 15 aa, synthetic construct
  REGION 1..15: note = Synthetic
RLDVGTNLGNAIAKL

SEQ ID NO: 1466 - protein, 9 aa, synthetic construct
  REGION 1..9: note = Synthetic
RLERKWLDV

SEQ ID NO: 1467 - protein, 15 aa, synthetic construct
  REGION 1..15: note = Synthetic
RLGGKEDRRVKQSRG

SEQ ID NO: 1468 - protein, 20 aa, synthetic construct
  REGION 1..20: note = Synthetic
RLGGKEDRRVKQSRGEARES

SEQ ID NO: 1469 - protein, 9 aa, synthetic construct
  REGION 1..9: note = Synthetic
RLLDRLVRL

SEQ ID NO: 1470 - protein, 8 aa, synthetic construct
  REGION 1..8: note = Synthetic
RLRLVDAD

SEQ ID NO: 1471 - protein, 13 aa, synthetic construct
  REGION 1..13: note = Synthetic
RLRLVDADDPLLR

SEQ ID NO: 1472 - protein, 31 aa, synthetic construct
  REGION 1..31: note = Synthetic
RLRLVDADDPLLRTAPGPGEVWVTPVIGSQA

SEQ ID NO: 1473 - protein, 32 aa, synthetic construct
  REGION 1..32: note = Synthetic
RLRLVQDADDPLLRIAPGPGEVWVTPVIGSQA

SEQ ID NO: 1474 - protein, 10 aa, synthetic construct
  REGION 1..10: note = Synthetic
RLSDNGYYTV

SEQ ID NO: 1475 - protein, 8 aa, synthetic construct
  REGION 1..8: note = Synthetic
RLVDADDP

SEQ ID NO: 1476 - protein, 15 aa, synthetic construct
  REGION 1..15: note = Synthetic
RLVDADDPLLRTAPG

SEQ ID NO: 1477 - protein, 8 aa, synthetic construct
  REGION 1..8: note = Synthetic
RLVGATPE

SEQ ID NO: 1478 - protein, 27 aa, synthetic construct
  REGION 1..27: note = Synthetic
RMQTGRGGSAPRPELGPPTNPFQAAVA

SEQ ID NO: 1479 - protein, 9 aa, synthetic construct
  REGION 1..9: note = Synthetic
RMSKGVFKV

SEQ ID NO: 1480 - protein, 15 aa, synthetic construct
  REGION 1..15: note = Synthetic
RNPGLGAPVFHMTNY

SEQ ID NO: 1481 - protein, 8 aa, synthetic construct
  REGION 1..8: note = Synthetic
RPRLRLVD

SEQ ID NO: 1482 - protein, 19 aa, synthetic construct
  REGION 1..19: note = Synthetic
RQAESSEAMAAWSERAGEA

SEQ ID NO: 1483 - protein, 15 aa, synthetic construct
  REGION 1..15: note = Synthetic
RQTWAEWAAAHWWQL

SEQ ID NO: 1484 - protein, 13 aa, synthetic construct
  REGION 1..13: note = Synthetic
RRVKQSRGEARES

SEQ ID NO: 1485 - protein, 9 aa, synthetic construct
  REGION 1..9: note = Synthetic
RRYPDAVYL

SEQ ID NO: 1486 - protein, 15 aa, synthetic construct
  REGION 1..15: note = Synthetic
RRYPDAVYLHRIDLG

SEQ ID NO: 1487 - protein, 15 aa, synthetic construct
  REGION 1..15: note = Synthetic
RSAGKVSSTLASELG

SEQ ID NO: 1488 - protein, 20 aa, synthetic construct
  REGION 1..20: note = Synthetic
RSAGKVSSTLASELGITAED

SEQ ID NO: 1489 - protein, 8 aa, synthetic construct
  REGION 1..8: note = Synthetic
RSELSQLS

SEQ ID NO: 1490 - protein, 15 aa, synthetic construct
  REGION 1..15: note = Synthetic
RSELSQLSMYRVFEV

SEQ ID NO: 1491 - protein, 24 aa, synthetic construct
  REGION 1..24: note = Synthetic
RSQTPAPKPSRAPPQQPQPPRMQT

SEQ ID NO: 1492 - protein, 8 aa, synthetic construct
  REGION 1..8: note = Synthetic
RTAPGPGE

SEQ ID NO: 1493 - protein, 15 aa, synthetic construct
  REGION 1..15: note = Synthetic
RTAPGPGEVWVTPVI

SEQ ID NO: 1494 - protein, 15 aa, synthetic construct
  REGION 1..15: note = Synthetic
RTDDKLRMETCFQQA

SEQ ID NO: 1495 - protein, 15 aa, synthetic construct
  REGION 1..15: note = Synthetic
RTLAPPRNVRVTGCY

SEQ ID NO: 1496 - protein, 15 aa, synthetic construct
  REGION 1..15: note = Synthetic
RTVLEPIRDALNAMT

SEQ ID NO: 1497 - protein, 15 aa, synthetic construct
  REGION 1..15: note = Synthetic
RVEHAVVYYVYSPSR

SEQ ID NO: 1498 - protein, 15 aa, synthetic construct
  REGION 1..15: note = Synthetic
RVFEVGVIRNPGLGA

SEQ ID NO: 1499 - protein, 19 aa, synthetic construct
  REGION 1..19: note = Synthetic
RVHVSKEEQYYDYEDATFE

SEQ ID NO: 1500 - protein, 8 aa, synthetic construct
  REGION 1..8: note = Synthetic
RVIDPAAQ

SEQ ID NO: 1501 - protein, 15 aa, synthetic construct
  REGION 1..15: note = Synthetic
RVKFHTETRTVWQLS

SEQ ID NO: 1502 - protein, 11 aa, synthetic construct
  REGION 1..11: note = Synthetic
RVYHNGITGET

SEQ ID NO: 1503 - protein, 11 aa, synthetic construct
  REGION 1..11: note = Synthetic
RYDSRPPEDVF

SEQ ID NO: 1504 - protein, 15 aa, synthetic construct
  REGION 1..15: note = Synthetic
RYPDAVYLHRIDLGP

SEQ ID NO: 1505 - protein, 15 aa, synthetic construct
  REGION 1..15: note = Synthetic
SAEISIQALSYALGG

SEQ ID NO: 1506 - protein, 15 aa, synthetic construct
  REGION 1..15: note = Synthetic
SAEPLLSCKPWQESR

SEQ ID NO: 1507 - protein, 20 aa, synthetic construct
  REGION 1..20: note = Synthetic
SAEPLLSCKPWQESRKNKAQ

SEQ ID NO: 1508 - protein, 14 aa, synthetic construct
  REGION 1..14: note = Synthetic
SAGKVSSTLASELG

SEQ ID NO: 1509 - protein, 24 aa, synthetic construct
  REGION 1..24: note = Synthetic
SAGKVSSTLASELGITAEDARLVS

SEQ ID NO: 1510 - protein, 10 aa, synthetic construct
  REGION 1..10: note = Synthetic
SCTVTREDGT

SEQ ID NO: 1511 - protein, 15 aa, synthetic construct
  REGION 1..15: note = Synthetic
SDAACWGFPTDTVMS

SEQ ID NO: 1512 - protein, 13 aa, synthetic construct
  REGION 1..13: note = Synthetic
SDARAAHLPTGTP

SEQ ID NO: 1513 - protein, 23 aa, synthetic construct
  REGION 1..23: note = Synthetic
SDWHQGTHVCHTKHMDFWCVEHD

SEQ ID NO: 1514 - protein, 15 aa, synthetic construct
  REGION 1..15: note = Synthetic
SELRRWIKYTQQRRV

SEQ ID NO: 1515 - protein, 20 aa, synthetic construct
  REGION 1..20: note = Synthetic
SELRRWIKYTQQRRVVGEFR

SEQ ID NO: 1516 - protein, 6 aa, synthetic construct
  REGION 1..6: note = Synthetic
SELSQL

SEQ ID NO: 1517 - protein, 7 aa, synthetic construct
  REGION 1..7: note = Synthetic
SELSQLS

SEQ ID NO: 1518 - protein, 20 aa, synthetic construct
  REGION 1..20: note = Synthetic
SEYLAHRRIPPENIRRVTRV

SEQ ID NO: 1519 - protein, 13 aa, synthetic construct
  REGION 1..13: note = Synthetic
SFLQGDQSENELP

SEQ ID NO: 1520 - protein, 15 aa, synthetic construct
  REGION 1..15: note = Synthetic
SGKGVSFQLVKLGVW

SEQ ID NO: 1521 - protein, 15 aa, synthetic construct
  REGION 1..15: note = Synthetic
SHRGVIADNQAKWAV

SEQ ID NO: 1522 - protein, 15 aa, synthetic construct
  REGION 1..15: note = Synthetic
SIEHQVKDVLTPLFK

SEQ ID NO: 1523 - protein, 15 aa, synthetic construct
  REGION 1..15: note = Synthetic
SKIGVVGIGSASYKV

SEQ ID NO: 1524 - protein, 15 aa, synthetic construct
  REGION 1..15: note = Synthetic
SKRSELSQLSMYRVF

SEQ ID NO: 1525 - protein, 21 aa, synthetic construct
  REGION 1..21: note = Synthetic
SLFVESPGQLIQRITDDPDVS

SEQ ID NO: 1526 - protein, 15 aa, synthetic construct
  REGION 1..15: note = Synthetic
SLSTNLDVTNSIEHQ

SEQ ID NO: 1527 - protein, 25 aa, synthetic construct
  REGION 1..25: note = Synthetic
SLSTNLDVTNSIEHQVKDVLTPLFK

SEQ ID NO: 1528 - protein, 10 aa, synthetic construct
  REGION 1..10: note = Synthetic
SLWGSGLLML

SEQ ID NO: 1529 - protein, 15 aa, synthetic construct
  REGION 1..15: note = Synthetic
SMKGLSSTSIVYILI

SEQ ID NO: 1530 - protein, 10 aa, synthetic construct
  REGION 1..10: note = Synthetic
SMYRVFEVGV

SEQ ID NO: 1531 - protein, 15 aa, synthetic construct
  REGION 1..15: note = Synthetic
SNDLSNCMVALGELK

SEQ ID NO: 1532 - protein, 8 aa, synthetic construct
  REGION 1..8: note = Synthetic
SPGQLIQR

SEQ ID NO: 1533 - protein, 13 aa, synthetic construct
  REGION 1..13: note = Synthetic
SQDPQDSRRSAEP

SEQ ID NO: 1534 - protein, 15 aa, synthetic construct
  REGION 1..15: note = Synthetic
SRIVINREHLMIDRP

SEQ ID NO: 1535 - protein, 13 aa, synthetic construct
  REGION 1..13: note = Synthetic
SRKNKAQTRTPLQ

SEQ ID NO: 1536 - protein, 8 aa, synthetic construct
  REGION 1..8: note = Synthetic
SRLVGATP

SEQ ID NO: 1537 - protein, 24 aa, synthetic construct
  REGION 1..24: note = Synthetic
SRLVGATPERPRLRLVDADDPLLR

SEQ ID NO: 1538 - protein, 15 aa, synthetic construct
  REGION 1..15: note = Synthetic
SRPGLKPDLTGTSKS

SEQ ID NO: 1539 - protein, 15 aa, synthetic construct
  REGION 1..15: note = Synthetic
SRRSVASIVGTLVRM

SEQ ID NO: 1540 - protein, 15 aa, synthetic construct
  REGION 1..15: note = Synthetic
SRWGLGSPNCHGPDW

SEQ ID NO: 1541 - protein, 5 aa, synthetic construct
  REGION 1..5: note = Synthetic
SSATK

SEQ ID NO: 1542 - protein, 15 aa, synthetic construct
  REGION 1..15: note = Synthetic
SSGGYAQLASYFNPG

SEQ ID NO: 1543 - protein, 7 aa, synthetic construct
  REGION 1..7: note = Synthetic
SSLGNGV

SEQ ID NO: 1544 - protein, 15 aa, synthetic construct
  REGION 1..15: note = Synthetic
SSNLVILPGQDLQYV

SEQ ID NO: 1545 - protein, 15 aa, synthetic construct
  REGION 1..15: note = Synthetic
SSQDPQDSRRSAEPL

SEQ ID NO: 1546 - protein, 20 aa, synthetic construct
  REGION 1..20: note = Synthetic
SSQDPQDSRRSAEPLLSCKP

SEQ ID NO: 1547 - protein, 15 aa, synthetic construct
  REGION 1..15: note = Synthetic
SSRRHKRFAGVVLAG

SEQ ID NO: 1548 - protein, 15 aa, synthetic construct
  REGION 1..15: note = Synthetic
SSTSIVYILIAVCLG

SEQ ID NO: 1549 - protein, 7 aa, synthetic construct
  REGION 1..7: note = Synthetic
STPGIVI

SEQ ID NO: 1550 - protein, 23 aa, synthetic construct
  REGION 1..23: note = Synthetic
STPGIVIPPQEQITQHGSPYGRC

SEQ ID NO: 1551 - protein, 12 aa, synthetic construct
  REGION 1..12: note = Synthetic
STSSSRRYTEVY

SEQ ID NO: 1552 - protein, 15 aa, synthetic construct
  REGION 1..15: note = Synthetic
SYFIVLSIAYPTLSE

SEQ ID NO: 1553 - protein, 13 aa, synthetic construct
  REGION 1..13: note = Synthetic
SYRETGPSRASDA

SEQ ID NO: 1554 - protein, 4 aa, synthetic construct
  REGION 1..4: note = Synthetic
SYVK

SEQ ID NO: 1555 - protein, 15 aa, synthetic construct
  REGION 1..15: note = Synthetic
SYVQHPHKTVRVKFH

SEQ ID NO: 1556 - protein, 8 aa, synthetic construct
  REGION 1..8: note = Synthetic
TAPGPGEV

SEQ ID NO: 1557 - protein, 14 aa, synthetic construct
  REGION 1..14: note = Synthetic
TATRLLSSTNSRLC

SEQ ID NO: 1558 - protein, 15 aa, synthetic construct
  REGION 1..15: note = Synthetic
TDDPVIDRLYLSSHR

SEQ ID NO: 1559 - protein, 15 aa, synthetic construct
  REGION 1..15: note = Synthetic
TEILSLFGPSLRDPI

SEQ ID NO: 1560 - protein, 15 aa, synthetic construct
  REGION 1..15: note = Synthetic
TETRTVWQLSVAGVS

SEQ ID NO: 1561 - protein, 14 aa, synthetic construct
  REGION 1..14: note = Synthetic
TEVYLEHRMQEAVE

SEQ ID NO: 1562 - protein, 15 aa, synthetic construct
  REGION 1..15: note = Synthetic
TFMPEGTVCSQNALY

SEQ ID NO: 1563 - protein, 15 aa, synthetic construct
  REGION 1..15: note = Synthetic
TGACICEIPTDVSCE

SEQ ID NO: 1564 - protein, 7 aa, synthetic construct
  REGION 1..7: note = Synthetic
TGDLRAY

SEQ ID NO: 1565 - protein, 15 aa, synthetic construct
  REGION 1..15: note = Synthetic
TGMQSWVPLSTDDPV

SEQ ID NO: 1566 - protein, 15 aa, synthetic construct
  REGION 1..15: note = Synthetic
TGNQQSRWGLGSPNC

SEQ ID NO: 1567 - protein, 13 aa, synthetic construct
  REGION 1..13: note = Synthetic
TGPSRASDARAAH

SEQ ID NO: 1568 - protein, 15 aa, synthetic construct
  REGION 1..15: note = Synthetic
TGTIINQDPDKILTY

SEQ ID NO: 1569 - protein, 15 aa, synthetic construct
  REGION 1..15: note = Synthetic
TGVVYGTHTTAVSET

SEQ ID NO: 1570 - protein, 15 aa, synthetic construct
  REGION 1..15: note = Synthetic
TIRGQFSNMSLSLLD

SEQ ID NO: 1571 - protein, 15 aa, synthetic construct
  REGION 1..15: note = Synthetic
TLGATCALPLAGLLA

SEQ ID NO: 1572 - protein, 9 aa, synthetic construct
  REGION 1..9: note = Synthetic
TLLNNCTRV

SEQ ID NO: 1573 - protein, 12 aa, synthetic construct
  REGION 1..12: note = Synthetic
TLNVPPPPDPGR

SEQ ID NO: 1574 - protein, 22 aa, synthetic construct
  REGION 1..22: note = Synthetic
TLNVPPPPDPGRASTSGTPIKK

SEQ ID NO: 1575 - protein, 15 aa, synthetic construct
  REGION 1..15: note = Synthetic
TMTSQGMYGGTYPVE

SEQ ID NO: 1576 - protein, 15 aa, synthetic construct
  REGION 1..15: note = Synthetic
TNLGNAIAKLEDAKE

SEQ ID NO: 1577 - protein, 15 aa, synthetic construct
  REGION 1..15: note = Synthetic
TNMEDEADQYFSHDD

SEQ ID NO: 1578 - protein, 20 aa, synthetic construct
  REGION 1..20: note = Synthetic
TNMEDEADQYFSHDDPISSD

SEQ ID NO: 1579 - protein, 15 aa, synthetic construct
  REGION 1..15: note = Synthetic
TNPFQAAVARGLRPP

SEQ ID NO: 1580 - protein, 15 aa, synthetic construct
  REGION 1..15: note = Synthetic
TNSIEHQVKDVLTPL

SEQ ID NO: 1581 - protein, 15 aa, synthetic construct
  REGION 1..15: note = Synthetic
TNYLEQPVSNDLSNC

SEQ ID NO: 1582 - protein, 27 aa, synthetic construct
  REGION 1..27: note = Synthetic
TNYLEQPVSNDLSNCMVALGELKLAAL

SEQ ID NO: 1583 - protein, 8 aa, synthetic construct
  REGION 1..8: note = Synthetic
TPERPRLR

SEQ ID NO: 1584 - protein, 20 aa, synthetic construct
  REGION 1..20: note = Synthetic
TPERPRLRLVDADDPLLRTA

SEQ ID NO: 1585 - protein, 9 aa, synthetic construct
  REGION 1..9: note = Synthetic
TPGNKPRIA

SEQ ID NO: 1586 - protein, 15 aa, synthetic construct
  REGION 1..15: note = Synthetic
TPLDIDTASESSQDP

SEQ ID NO: 1587 - protein, 20 aa, synthetic construct
  REGION 1..20: note = Synthetic
TPLDIDTASESSQDPQDSRR

SEQ ID NO: 1588 - protein, 15 aa, synthetic construct
  REGION 1..15: note = Synthetic
TPLFKIIGDEVGLRT

SEQ ID NO: 1589 - protein, 7 aa, synthetic construct
  REGION 1..7: note = Synthetic
TPLQCTM

SEQ ID NO: 1590 - protein, 8 aa, synthetic construct
  REGION 1..8: note = Synthetic
TPVIGSQA

SEQ ID NO: 1591 - protein, 10 aa, synthetic construct
  REGION 1..10: note = Synthetic
TPVIGSQARK

SEQ ID NO: 1592 - protein, 15 aa, synthetic construct
  REGION 1..15: note = Synthetic
TQGYLISNFDESSCT

SEQ ID NO: 1593 - protein, 24 aa, synthetic construct
  REGION 1..24: note = Synthetic
TRANPNPYTSRRSVASIVGTLVRM

SEQ ID NO: 1594 - protein, 13 aa, synthetic construct
  REGION 1..13: note = Synthetic
TRFGCAMRWGLPP

SEQ ID NO: 1595 - protein, 16 aa, synthetic construct
  REGION 1..16: note = Synthetic
TRNTGQPATDHYYSNV

SEQ ID NO: 1596 - protein, 13 aa, synthetic construct
  REGION 1..13: note = Synthetic
TRTPLQCTMTEIF

SEQ ID NO: 1597 - protein, 12 aa, synthetic construct
  REGION 1..12: note = Synthetic
TRWHRLLRMPVR

SEQ ID NO: 1598 - protein, 15 aa, synthetic construct
  REGION 1..15: note = Synthetic
TSGSGGAIRGIKHII

SEQ ID NO: 1599 - protein, 20 aa, synthetic construct
  REGION 1..20: note = Synthetic
TSGSGGAIRGIKHIIIVPIP

SEQ ID NO: 1600 - protein, 15 aa, synthetic construct
  REGION 1..15: note = Synthetic
TSQGMYGGTYLVEKP

SEQ ID NO: 1601 - protein, 15 aa, synthetic construct
  REGION 1..15: note = Synthetic
TSRVEHAVVYYVYSP

SEQ ID NO: 1602 - protein, 12 aa, synthetic construct
  REGION 1..12: note = Synthetic
TSSSRRYTEVYL

SEQ ID NO: 1603 - protein, 5 aa, synthetic construct
  REGION 1..5: note = Synthetic
TSYVG

SEQ ID NO: 1604 - protein, 15 aa, synthetic construct
  REGION 1..15: note = Synthetic
TTEDKISRAVGPRQA

SEQ ID NO: 1605 - protein, 20 aa, synthetic construct
  REGION 1..20: note = Synthetic
TTEDKISRAVGPRQAQVSFL

SEQ ID NO: 1606 - protein, 13 aa, synthetic construct
  REGION 1..13: note = Synthetic
TTERIETRSARHP

SEQ ID NO: 1607 - protein, 15 aa, synthetic construct
  REGION 1..15: note = Synthetic
TTNQAIEAIRQAGQE

SEQ ID NO: 1608 - protein, 15 aa, synthetic construct
  REGION 1..15: note = Synthetic
TTSDPWHPPGPLGLK

SEQ ID NO: 1609 - protein, 15 aa, synthetic construct
  REGION 1..15: note = Synthetic
TVCSQNALYPMSPLL

SEQ ID NO: 1610 - protein, 15 aa, synthetic construct
  REGION 1..15: note = Synthetic
TVNGEDVGAVPPGKF

SEQ ID NO: 1611 - protein, 15 aa, synthetic construct
  REGION 1..15: note = Synthetic
TYPVEKPNLSSKRSE

SEQ ID NO: 1612 - protein, 15 aa, synthetic construct
  REGION 1..15: note = Synthetic
VAGVSCNVTTEHPFC

SEQ ID NO: 1613 - protein, 23 aa, synthetic construct
  REGION 1..23: note = Synthetic
VAPGIVIPPKALFTQQGGAYGRC

SEQ ID NO: 1614 - protein, 25 aa, synthetic construct
  REGION 1..25: note = Synthetic
VCHTKHMDFWCVEHDRPPPATPTPL

SEQ ID NO: 1615 - protein, 19 aa, synthetic construct
  REGION 1..19: note = Synthetic
VCQRHSPDCSRLVGATPER

SEQ ID NO: 1616 - protein, 8 aa, synthetic construct
  REGION 1..8: note = Synthetic
VDADDPLL

SEQ ID NO: 1617 - protein, 20 aa, synthetic construct
  REGION 1..20: note = Synthetic
VDADDPLLRTAPGPGEVWVT

SEQ ID NO: 1618 - protein, 20 aa, synthetic construct
  REGION 1..20: note = Synthetic
VDIGFAAYNFVESIINLFQV

SEQ ID NO: 1619 - protein, 15 aa, synthetic construct
  REGION 1..15: note = Synthetic
VEIAEYRRLLRTVLE

SEQ ID NO: 1620 - protein, 15 aa, synthetic construct
  REGION 1..15: note = Synthetic
VELENSMGGLNFGRS

SEQ ID NO: 1621 - protein, 20 aa, synthetic construct
  REGION 1..20: note = Synthetic
VELENSMGGLNFGRSYFDPA

SEQ ID NO: 1622 - protein, 15 aa, synthetic construct
  REGION 1..15: note = Synthetic
VELKIKIASGFGPLI

SEQ ID NO: 1623 - protein, 14 aa, synthetic construct
  REGION 1..14: note = Synthetic
VEMDEWIHAHTTSD

SEQ ID NO: 1624 - protein, 15 aa, synthetic construct
  REGION 1..15: note = Synthetic
VEMPEWIHAHTTSDP

SEQ ID NO: 1625 - protein, 9 aa, synthetic construct
  REGION 1..9: note = Synthetic
VERRLVKVL

SEQ ID NO: 1626 - protein, 8 aa, synthetic construct
  REGION 1..8: note = Synthetic
VESPGQLI

SEQ ID NO: 1627 - protein, 15 aa, synthetic construct
  REGION 1..15: note = Synthetic
VESPGQLIQRITDDP

SEQ ID NO: 1628 - protein, 20 aa, synthetic construct
  REGION 1..20: note = Synthetic
VESPGQLIQRITDDPDVSIR

SEQ ID NO: 1629 - protein, 15 aa, synthetic construct
  REGION 1..15: note = Synthetic
VFALASYVQHPHKTV

SEQ ID NO: 1630 - protein, 8 aa, synthetic construct
  REGION 1..8: note = Synthetic
VGATPERP

SEQ ID NO: 1631 - protein, 10 aa, synthetic construct
  REGION 1..10: note = Synthetic
VGATPERPRL

SEQ ID NO: 1632 - protein, 15 aa, synthetic construct
  REGION 1..15: note = Synthetic
VGATPERPRLRLVDA

SEQ ID NO: 1633 - protein, 15 aa, synthetic construct
  REGION 1..15: note = Synthetic
VGIGSASYKVMTRSS

SEQ ID NO: 1634 - protein, 15 aa, synthetic construct
  REGION 1..15: note = Synthetic
VGLRTPQRFTDLVKF

SEQ ID NO: 1635 - protein, 20 aa, synthetic construct
  REGION 1..20: note = Synthetic
VHHNTEEIVAQSIALSSLMV

SEQ ID NO: 1636 - protein, 15 aa, synthetic construct
  REGION 1..15: note = Synthetic
VHRLEGVSYNIGSQE

SEQ ID NO: 1637 - protein, 8 aa, synthetic construct
  REGION 1..8: note = Synthetic
VIGSQARK

SEQ ID NO: 1638 - protein, 6 aa, synthetic construct
  REGION 1..6: note = Synthetic
VITGSI

SEQ ID NO: 1639 - protein, 6 aa, synthetic construct
  REGION 1..6: note = Synthetic
VITGTI

SEQ ID NO: 1640 - protein, 8 aa, synthetic construct
  REGION 1..8: note = Synthetic
VKQSRGEA

SEQ ID NO: 1641 - protein, 10 aa, synthetic construct
  REGION 1..10: note = Synthetic
VLFVMFLSLI

SEQ ID NO: 1642 - protein, 15 aa, synthetic construct
  REGION 1..15: note = Synthetic
VLFVMFLSLIGLLAI

SEQ ID NO: 1643 - protein, 15 aa, synthetic construct
  REGION 1..15: note = Synthetic
VLTPLFKIIGDEVGL

SEQ ID NO: 1644 - protein, 15 aa, synthetic construct
  REGION 1..15: note = Synthetic
VMTRSSHQSLVIKLM

SEQ ID NO: 1645 - protein, 15 aa, synthetic construct
  REGION 1..15: note = Synthetic
VPAAPCARIWNGTQR

SEQ ID NO: 1646 - protein, 15 aa, synthetic construct
  REGION 1..15: note = Synthetic
VPPDPGDLVEYIMNY

SEQ ID NO: 1647 - protein, 15 aa, synthetic construct
  REGION 1..15: note = Synthetic
VQSVASSRRHKRFAG

SEQ ID NO: 1648 - protein, 17 aa, synthetic construct
  REGION 1..17: note = Synthetic
VQTGGTSRTVTMRYLAS

SEQ ID NO: 1649 - protein, 5 aa, synthetic construct
  REGION 1..5: note = Synthetic
VQVRI

SEQ ID NO: 1650 - protein, 11 aa, synthetic construct
  REGION 1..11: note = Synthetic
VRAYNQPAGDV

SEQ ID NO: 1651 - protein, 15 aa, synthetic construct
  REGION 1..15: note = Synthetic
VRFESKIVDGGCFAP

SEQ ID NO: 1652 - protein, 15 aa, synthetic construct
  REGION 1..15: note = Synthetic
VRLAGVRFESKIVDG

SEQ ID NO: 1653 - protein, 15 aa, synthetic construct
  REGION 1..15: note = Synthetic
VSGSFGNRFILSQGN

SEQ ID NO: 1654 - protein, 14 aa, synthetic construct
  REGION 1..14: note = Synthetic
VSKEEQYYDYEDAT

SEQ ID NO: 1655 - protein, 15 aa, synthetic construct
  REGION 1..15: note = Synthetic
VSKGNCSGPTTIRGQ

SEQ ID NO: 1656 - protein, 15 aa, synthetic construct
  REGION 1..15: note = Synthetic
VTAALLNTPPPYQVS

SEQ ID NO: 1657 - protein, 15 aa, synthetic construct
  REGION 1..15: note = Synthetic
VTGCYQCGTPALVEG

SEQ ID NO: 1658 - protein, 8 aa, synthetic construct
  REGION 1..8: note = Synthetic
VTPVIGSQ

SEQ ID NO: 1659 - protein, 22 aa, synthetic construct
  REGION 1..22: note = Synthetic
VTTEHPFCNTPHGQLEVQVPPD

SEQ ID NO: 1660 - protein, 15 aa, synthetic construct
  REGION 1..15: note = Synthetic
VVLAGAALGVATAAQ

SEQ ID NO: 1661 - protein, 15 aa, synthetic construct
  REGION 1..15: note = Synthetic
VWQLSVAGVSCNVTT

SEQ ID NO: 1662 - protein, 8 aa, synthetic construct
  REGION 1..8: note = Synthetic
VWVTPVIG

SEQ ID NO: 1663 - protein, 12 aa, synthetic construct
  REGION 1..12: note = Synthetic
VWVTPVIGSQAR

SEQ ID NO: 1664 - protein, 15 aa, synthetic construct
  REGION 1..15: note = Synthetic
VYILIAVCLGGLIGI

SEQ ID NO: 1665 - protein, 15 aa, synthetic construct
  REGION 1..15: note = Synthetic
VYLHRIDLGPPISLE

SEQ ID NO: 1666 - protein, 8 aa, synthetic construct
  REGION 1..8: note = Synthetic
VYRYDSRP

SEQ ID NO: 1667 - protein, 12 aa, synthetic construct
  REGION 1..12: note = Synthetic
VYRYDSRPPEDV

SEQ ID NO: 1668 - protein, 15 aa, synthetic construct
  REGION 1..15: note = Synthetic
VYWLTIPPMKNLALG

SEQ ID NO: 1669 - protein, 15 aa, synthetic construct
  REGION 1..15: note = Synthetic
WDLEATGACICEIPT

SEQ ID NO: 1670 - protein, 15 aa, synthetic construct
  REGION 1..15: note = Synthetic
WDQKLWCRHFCVLAD

SEQ ID NO: 1671 - protein, 15 aa, synthetic construct
  REGION 1..15: note = Synthetic
WGFPTDTVMSVFALA

SEQ ID NO: 1672 - protein, 15 aa, synthetic construct
  REGION 1..15: note = Synthetic
WHPPGPLGLKFKTVR

SEQ ID NO: 1673 - protein, 15 aa, synthetic construct
  REGION 1..15: note = Synthetic
WIHAHTTSDPWHPPG

SEQ ID NO: 1674 - protein, 15 aa, synthetic construct
  REGION 1..15: note = Synthetic
WLTIPPMKNLALGVI

SEQ ID NO: 1675 - protein, 20 aa, synthetic construct
  REGION 1..20: note = Synthetic
WQESRKNKAQTRTPLQCTMT

SEQ ID NO: 1676 - protein, 13 aa, synthetic construct
  REGION 1..13: note = Synthetic
WVCIFMVCRRACR

SEQ ID NO: 1677 - protein, 8 aa, synthetic construct
  REGION 1..8: note = Synthetic
WVTPVIGS

SEQ ID NO: 1678 - protein, 15 aa, synthetic construct
  REGION 1..15: note = Synthetic
WYTTVPKYVATQGYL

SEQ ID NO: 1679 - protein, 15 aa, synthetic construct
  REGION 1..15: note = Synthetic
YALGGDINKVLEKLG

SEQ ID NO: 1680 - protein, 10 aa, synthetic construct
  REGION 1..10: note = Synthetic
YAMGVGVELE

SEQ ID NO: 1681 - protein, 11 aa, synthetic construct
  REGION 1..11: note = Synthetic
YAMGVGVELEN

SEQ ID NO: 1682 - protein, 15 aa, synthetic construct
  REGION 1..15: note = Synthetic
YCADVAAEELMNALV

SEQ ID NO: 1683 - protein, 15 aa, synthetic construct
  REGION 1..15: note = Synthetic
YDFRDLTWCINPPER

SEQ ID NO: 1684 - protein, 7 aa, synthetic construct
  REGION 1..7: note = Synthetic
YFEPGPT

SEQ ID NO: 1685 - protein, 15 aa, synthetic construct
  REGION 1..15: note = Synthetic
YFNPGGSYYKQYHPT

SEQ ID NO: 1686 - protein, 15 aa, synthetic construct
  REGION 1..15: note = Synthetic
YFRLGQEMVRRSAGK

SEQ ID NO: 1687 - protein, 20 aa, synthetic construct
  REGION 1..20: note = Synthetic
YFRLGQEMVRRSAGKVSSTL

SEQ ID NO: 1688 - protein, 15 aa, synthetic construct
  REGION 1..15: note = Synthetic
YFYPFRLPIKGVPIE

SEQ ID NO: 1689 - protein, 15 aa, synthetic construct
  REGION 1..15: note = Synthetic
YGDNAGRILAGALAT

SEQ ID NO: 1690 - protein, 15 aa, synthetic construct
  REGION 1..15: note = Synthetic
YGHATVEMPEWIHAH

SEQ ID NO: 1691 - protein, 15 aa, synthetic construct
  REGION 1..15: note = Synthetic
YIMNYTGNQQSRWGL

SEQ ID NO: 1692 - protein, 15 aa, synthetic construct
  REGION 1..15: note = Synthetic
YINNELIPSMNQLSC

SEQ ID NO: 1693 - protein, 15 aa, synthetic construct
  REGION 1..15: note = Synthetic
YLCTAPGCATQAPVP

SEQ ID NO: 1694 - protein, 15 aa, synthetic construct
  REGION 1..15: note = Synthetic
YLFTVPIKEAGEDCH

SEQ ID NO: 1695 - protein, 9 aa, synthetic construct
  REGION 1..9: note = Synthetic
YLHDPEFNL

SEQ ID NO: 1696 - protein, 9 aa, synthetic construct
  REGION 1..9: note = Synthetic
YLNMSRLFV

SEQ ID NO: 1697 - protein, 9 aa, synthetic construct
  REGION 1..9: note = Synthetic
YPALGLHEF

SEQ ID NO: 1698 - protein, 10 aa, synthetic construct
  REGION 1..10: note = Synthetic
YPALGLHEFA

SEQ ID NO: 1699 - protein, 15 aa, synthetic construct
  REGION 1..15: note = Synthetic
YPALGLHEFAGELST

SEQ ID NO: 1700 - protein, 20 aa, synthetic construct
  REGION 1..20: note = Synthetic
YPALGLHEFAGELSTLESLM

SEQ ID NO: 1701 - protein, 15 aa, synthetic construct
  REGION 1..15: note = Synthetic
YPFRLPIKGVPIELQ

SEQ ID NO: 1702 - protein, 9 aa, synthetic construct
  REGION 1..9: note = Synthetic
YPLLWSYAM

SEQ ID NO: 1703 - protein, 7 aa, synthetic construct
  REGION 1..7: note = Synthetic
YQQQGRL

SEQ ID NO: 1704 - protein, 10 aa, synthetic construct
  REGION 1..10: note = Synthetic
YQSEYLAHRR

SEQ ID NO: 1705 - protein, 15 aa, synthetic construct
  REGION 1..15: note = Synthetic
YRETGPSRASDARAA

SEQ ID NO: 1706 - protein, 20 aa, synthetic construct
  REGION 1..20: note = Synthetic
YRETGPSRASDARAAHLPTG

SEQ ID NO: 1707 - protein, 25 aa, synthetic construct
  REGION 1..25: note = Synthetic
YRNASDVLPGHWLQGGWGCYNLSDW

SEQ ID NO: 1708 - protein, 15 aa, synthetic construct
  REGION 1..15: note = Synthetic
YRRLLRTVLEPIRDA

SEQ ID NO: 1709 - protein, 8 aa, synthetic construct
  REGION 1..8: note = Synthetic
YRYDSRPP

SEQ ID NO: 1710 - protein, 15 aa, synthetic construct
  REGION 1..15: note = Synthetic
YSGGDLLGILESRGI

SEQ ID NO: 1711 - protein, 25 aa, synthetic construct
  REGION 1..25: note = Synthetic
YSKVTATBLLASTNSRLCAVFVRDG

SEQ ID NO: 1712 - protein, 15 aa, synthetic construct
  REGION 1..15: note = Synthetic
YSPSRSFSYFYPFRL

SEQ ID NO: 1713 - protein, 25 aa, synthetic construct
  REGION 1..25: note = Synthetic
YTGNQQSRWGLGSPNCHGPDWASPV

SEQ ID NO: 1714 - protein, 9 aa, synthetic construct
  REGION 1..9: note = Synthetic
YVLLAVLFV

SEQ ID NO: 1715 - protein, 15 aa, synthetic construct
  REGION 1..15: note = Synthetic
YVYSPGRSFSYFYPF

SEQ ID NO: 1716 - protein, 27 aa, synthetic construct
  REGION 1..27: note = Synthetic
YYDYEDATFQTYALTGISLCNPAASIC

SEQ ID NO: 1717 - protein, 15 aa, synthetic construct
  REGION 1..15: note = Synthetic
GDLLGILESRGIKAR

SEQ ID NO: 1718 - protein, 15 aa, synthetic construct
  REGION 1..15: note = Synthetic
TVPKYVATQGYLISN

SEQ ID NO: 1719 - protein, 9 aa, synthetic construct
  REGION 1..9: note = Synthetic
KPWDSPQEI

SEQ ID NO: 1720 - protein, 9 aa, synthetic construct
  REGION 1..9: note = Synthetic
KPWESPQEI

SEQ ID NO: 1721 - protein, 15 aa, synthetic construct
  REGION 1..15: note = Synthetic
ATYQSEYLAHRRIPP

SEQ ID NO: 1722 - protein, 35 aa, synthetic construct
  REGION 1..35: note = Synthetic
CMARQAESSEAMAAWSERAGEAMVLVYYESIAYSF

SEQ ID NO: 1723 - protein, 24 aa, synthetic construct
  REGION 1..24: note = Synthetic
CQVGSSNSAFVSTSSSRRYTEVYL

SEQ ID NO: 1724 - protein, 15 aa, synthetic construct
  REGION 1..15: note = Synthetic
DDPPATVYRYDSRPP

SEQ ID NO: 1725 - protein, 18 aa, synthetic construct
  REGION 1..18: note = Synthetic
GALATYQSEYLAHRRIPP

SEQ ID NO: 1726 - protein, 24 aa, synthetic construct
  REGION 1..24: note = Synthetic
MAAWSERAGEAMVLVYYESIAYSF

SEQ ID NO: 1727 - protein, 13 aa, synthetic construct
  REGION 1..13: note = Synthetic
MVLVYYESIAYSF

SEQ ID NO: 1728 - protein, 15 aa, synthetic construct
  REGION 1..15: note = Synthetic
PATVYRYDSRPPEDV

SEQ ID NO: 1729 - protein, 9 aa, synthetic construct
  REGION 1..9: note = Synthetic
YDSRPPEDV

SEQ ID NO: 1730 - protein, 10 aa, synthetic construct
  REGION 1..10: note = Synthetic
EPGITTNYDT

SEQ ID NO: 1731 - protein, 20 aa, synthetic construct
  REGION 1..20: note = Synthetic
GDLRAYKMVYATNPQTQLSN

SEQ ID NO: 1732 - protein, 21 aa, synthetic construct
  REGION 1..21: note = Synthetic
KNGDVEASAITTYVGFSVVYP

SEQ ID NO: 1733 - protein, 19 aa, synthetic construct
  REGION 1..19: note = Synthetic
KVTNGSKSYTLRYLASYVK

SEQ ID NO: 1734 - protein, 35 aa, synthetic construct
  REGION 1..35: note = Synthetic
QALGALKLYFEPGITTNYDTGDLIAYKQTYNASGN

SEQ ID NO: 1735 - protein, 10 aa, synthetic construct
  REGION 1..10: note = Synthetic
YATNPQTQLS

SEQ ID NO: 1736 - protein, 24 aa, synthetic construct
  REGION 1..24: note = Synthetic
DNENPLSGKAGGVVKVTYPGLTKV

SEQ ID NO: 1737 - protein, 17 aa, synthetic construct
  REGION 1..17: note = Synthetic
ENFSSYHGTKPGYVDSI

SEQ ID NO: 1738 - protein, 19 aa, synthetic construct
  REGION 1..19: note = Synthetic
KVDNAETIKKELGLSLTEP

SEQ ID NO: 1739 - protein, 21 aa, synthetic construct
  REGION 1..21: note = Synthetic
MEDLQKALEAQSRALRAGLAA

SEQ ID NO: 1740 - protein, 23 aa, synthetic construct
  REGION 1..23: note = Synthetic
QKGIQKPKSGTQGNYDDDWKGFY

SEQ ID NO: 1741 - protein, 34 aa, synthetic construct
  REGION 1..34: note = Synthetic
RTGAWQRKDWSRAPPPPEERQESRSQTPAPKPSR

SEQ ID NO: 1742 - protein, 29 aa, synthetic construct
  REGION 1..29: note = Synthetic
AAGASQSRRPRPPRHARAQHLPEMTPAVT

SEQ ID NO: 1743 - protein, 28 aa, synthetic construct
  REGION 1..28: note = Synthetic
CVTSWLWSEGEGAVFYRVDLHFINLGTP

SEQ ID NO: 1744 - protein, 27 aa, synthetic construct
  REGION 1..27: note = Synthetic
FRVGGTRWHRLLRMPVRGLDGDTAPLP

SEQ ID NO: 1745 - protein, 28 aa, synthetic construct
  REGION 1..28: note = Synthetic
GRKIRMRCRAIDGDVTFCRPKSPVYVGN

SEQ ID NO: 1746 - protein, 28 aa, synthetic construct
  REGION 1..28: note = Synthetic
GTPPLDEDGRWDPALMYNPCGPEPPAHV

SEQ ID NO: 1747 - protein, 54 aa, synthetic construct
  REGION 1..54: note = Synthetic
GVHANLHVAFHRSSSEKIHSNEISSDSIGVLGYQKTVDHTKVNSKLSLFFEIKS

SEQ ID NO: 1748 - protein, 30 aa, synthetic construct
  REGION 1..30: note = Synthetic
MASTTPITMEDLQKALEAQSRALRAGLAAG

SEQ ID NO: 1749 - protein, 34 aa, synthetic construct
  REGION 1..34: note = Synthetic
PELGPPTNPFQAAVARGLRPPLHDPDTEAPTEAC

SEQ ID NO: 1750 - protein, 26 aa, synthetic construct
  REGION 1..26: note = Synthetic
PLPPHTTERIETRSARHPWRIRFGAP

SEQ ID NO: 1751 - protein, 27 aa, synthetic construct
  REGION 1..27: note = Synthetic
SRAPPPPEERQESRSQTPAPKPSRAPP

SEQ ID NO: 1752 - protein, 28 aa, synthetic construct
  REGION 1..28: note = Synthetic
SRAPPQQPQPPRMQTGRGGSAPRPELGP

SEQ ID NO: 1753 - protein, 27 aa, synthetic construct
  REGION 1..27: note = Synthetic
TPAVTPEGPAPPRTGAWQRKDWSRAPP

SEQ ID NO: 1754 - protein, 29 aa, synthetic construct
  REGION 1..29: note = Synthetic
VRAYNQPAGDVRGVWGKGERTYAEQDFRV

SEQ ID NO: 1755 - protein, 20 aa, synthetic construct
  REGION 1..20: note = Synthetic
AFGHSDAACWGFPTDTVMSV

SEQ ID NO: 1756 - protein, 21 aa, synthetic construct
  REGION 1..21: note = Synthetic
CARIWNGTQRACTFWAVNAYS

SEQ ID NO: 1757 - protein, 22 aa, synthetic construct
  REGION 1..22: note = Synthetic
EEAFTYLCTAPGCATQTPVPVR

SEQ ID NO: 1758 - protein, 20 aa, synthetic construct
  REGION 1..20: note = Synthetic
FAPWDLEATGACICEIPTDV

SEQ ID NO: 1759 - protein, 17 aa, synthetic construct
  REGION 1..17: note = Synthetic
GEDVGAFPPGKFVTAAL

SEQ ID NO: 1760 - protein, 20 aa, synthetic construct
  REGION 1..20: note = Synthetic
GEVWVTPVIGSQARKCGLHI

SEQ ID NO: 1761 - protein, 20 aa, synthetic construct
  REGION 1..20: note = Synthetic
GQLEVQVPPDPGDLVEYIMN

SEQ ID NO: 1762 - protein, 20 aa, synthetic construct
  REGION 1..20: note = Synthetic
GSYYKQYHPTACEVEPAFGH

SEQ ID NO: 1763 - protein, 20 aa, synthetic construct
  REGION 1..20: note = Synthetic
IHAHTTSDPWHPPGPLGLKF

SEQ ID NO: 1764 - protein, 20 aa, synthetic construct
  REGION 1..20: note = Synthetic
IMNYTGNQQSRWGLGSPNCH

SEQ ID NO: 1765 - protein, 20 aa, synthetic construct
  REGION 1..20: note = Synthetic
LHIRAGPYGHATVEMPEWIH

SEQ ID NO: 1766 - protein, 20 aa, synthetic construct
  REGION 1..20: note = Synthetic
LKFKTVRPVALPRALAPPRN

SEQ ID NO: 1767 - protein, 22 aa, synthetic construct
  REGION 1..22: note = Synthetic
LNTPPPYQVSCGGESDRASAGH

SEQ ID NO: 1768 - protein, 20 aa, synthetic construct
  REGION 1..20: note = Synthetic
NCHGPDWASPVCQRHSPDCS

SEQ ID NO: 1769 - protein, 20 aa, synthetic construct
  REGION 1..20: note = Synthetic
PDCSRLVGATPERPRLRLVD

SEQ ID NO: 1770 - protein, 20 aa, synthetic construct
  REGION 1..20: note = Synthetic
PRNVRVTGCYQCGTPALVEG

SEQ ID NO: 1771 - protein, 21 aa, synthetic construct
  REGION 1..21: note = Synthetic
PTDVSCEGLGAWVPTAPCARI

SEQ ID NO: 1772 - protein, 20 aa, synthetic construct
  REGION 1..20: note = Synthetic
RLVDADDPLLRTAPGPGEVW

SEQ ID NO: 1773 - protein, 20 aa, synthetic construct
  REGION 1..20: note = Synthetic
SVFALASYVQHPHKTVRVKF

SEQ ID NO: 1774 - protein, 20 aa, synthetic construct
  REGION 1..20: note = Synthetic
VEGLAPGGGNCHLTVNGEDV

SEQ ID NO: 1775 - protein, 20 aa, synthetic construct
  REGION 1..20: note = Synthetic
VKFHTETRTVWQLSVAGVSC

SEQ ID NO: 1776 - protein, 20 aa, synthetic construct
  REGION 1..20: note = Synthetic
VPVRLAGVGFESKIVDGGCF

SEQ ID NO: 1777 - protein, 20 aa, synthetic construct
  REGION 1..20: note = Synthetic
VSCNVTTEHPFCNTPHGQLE

SEQ ID NO: 1778 - protein, 12 aa, synthetic construct
  REGION 1..12: note = Synthetic
AAASSPDAHVPF

SEQ ID NO: 1779 - protein, 7 aa, synthetic construct
  REGION 1..7: note = Synthetic
AASSPDA

SEQ ID NO: 1780 - protein, 12 aa, synthetic construct
  REGION 1..12: note = Synthetic
AKLGAAASSPDA

SEQ ID NO: 1781 - protein, 12 aa, synthetic construct
  REGION 1..12: note = Synthetic
AMKPYEVTPTRM

SEQ ID NO: 1782 - protein, 25 aa, synthetic construct
  REGION 1..25: note = Synthetic
AMTHLSPALADVPYVLVKTNMVVTS

SEQ ID NO: 1783 - protein, 12 aa, synthetic construct
  REGION 1..12: note = Synthetic
ASSPDAHVPFCF

SEQ ID NO: 1784 - protein, 25 aa, synthetic construct
  REGION 1..25: note = Synthetic
ASSPDAHVPFCFGKDLKRPGSSPME

SEQ ID NO: 1785 - protein, 12 aa, synthetic construct
  REGION 1..12: note = Synthetic
CFGKDLKRPGSS

SEQ ID NO: 1786 - protein, 25 aa, synthetic construct
  REGION 1..25: note = Synthetic
CFGKDLKRPGSSPMEVMLRAVFMQQ

SEQ ID NO: 1787 - protein, 12 aa, synthetic construct
  REGION 1..12: note = Synthetic
CGIAAKLGAAAS

SEQ ID NO: 1788 - protein, 25 aa, synthetic construct
  REGION 1..25: note = Synthetic
CGIAAKLGAAASSPDAHVPFCFGKD

SEQ ID NO: 1789 - protein, 12 aa, synthetic construct
  REGION 1..12: note = Synthetic
DAHVPFCFGKDL

SEQ ID NO: 1790 - protein, 12 aa, synthetic construct
  REGION 1..12: note = Synthetic
DLKRPGSSPMEV

SEQ ID NO: 1791 - protein, 12 aa, synthetic construct
  REGION 1..12: note = Synthetic
DVPYVLVKTNMV

SEQ ID NO: 1792 - protein, 26 aa, synthetic construct
  REGION 1..26: note = Synthetic
DVPYVLVKTNMVVTSVAMKPYEVTPT

SEQ ID NO: 1793 - protein, 12 aa, synthetic construct
  REGION 1..12: note = Synthetic
EVMLRAVFMQQR

SEQ ID NO: 1794 - protein, 12 aa, synthetic construct
  REGION 1..12: note = Synthetic
FEGKPALELIRM

SEQ ID NO: 1795 - protein, 12 aa, synthetic construct
  REGION 1..12: note = Synthetic
FLGPKQLTFEGK

SEQ ID NO: 1796 - protein, 25 aa, synthetic construct
  REGION 1..25: note = Synthetic
FLGPKQLTFEGKPALELIRMVECSG

SEQ ID NO: 1797 - protein, 17 aa, synthetic construct
  REGION 1..17: note = Synthetic
FMQQRPLRMFLGPKQLT

SEQ ID NO: 1798 - protein, 12 aa, synthetic construct
  REGION 1..12: note = Synthetic
GKDLKRPGSSPM

SEQ ID NO: 1799 - protein, 13 aa, synthetic construct
  REGION 1..13: note = Synthetic
GKDLKRPGSSPME

SEQ ID NO: 1800 - protein, 12 aa, synthetic construct
  REGION 1..12: note = Synthetic
GKPALELIRMVE

SEQ ID NO: 1801 - protein, 12 aa, synthetic construct
  REGION 1..12: note = Synthetic
GPKQLTFEGKPA

SEQ ID NO: 1802 - protein, 12 aa, synthetic construct
  REGION 1..12: note = Synthetic
HVPFCFGKDLKR

SEQ ID NO: 1803 - protein, 12 aa, synthetic construct
  REGION 1..12: note = Synthetic
IAAKLGAAASSP

SEQ ID NO: 1804 - protein, 12 aa, synthetic construct
  REGION 1..12: note = Synthetic
KPYEVTPTRMLV

SEQ ID NO: 1805 - protein, 12 aa, synthetic construct
  REGION 1..12: note = Synthetic
KQLTFEGKPALE

SEQ ID NO: 1806 - protein, 12 aa, synthetic construct
  REGION 1..12: note = Synthetic
KRPGSSPMEVML

SEQ ID NO: 1807 - protein, 12 aa, synthetic construct
  REGION 1..12: note = Synthetic
LELIRMVECSGK

SEQ ID NO: 1808 - protein, 12 aa, synthetic construct
  REGION 1..12: note = Synthetic
LGAAASSPDAHV

SEQ ID NO: 1809 - protein, 12 aa, synthetic construct
  REGION 1..12: note = Synthetic
LIRMVECSGKQD

SEQ ID NO: 1810 - protein, 12 aa, synthetic construct
  REGION 1..12: note = Synthetic
LVCGIAAKLGAA

SEQ ID NO: 1811 - protein, 11 aa, synthetic construct
  REGION 1..11: note = Synthetic
MKPYEVTPTRM

SEQ ID NO: 1812 - protein, 12 aa, synthetic construct
  REGION 1..12: note = Synthetic
MLRAVFMQQRPL

SEQ ID NO: 1813 - protein, 8 aa, synthetic construct
  REGION 1..8: note = Synthetic
MQQRPLRM

SEQ ID NO: 1814 - protein, 12 aa, synthetic construct
  REGION 1..12: note = Synthetic
MQQRPLRMFLGP

SEQ ID NO: 1815 - protein, 12 aa, synthetic construct
  REGION 1..12: note = Synthetic
MVVTSVAMKPYE

SEQ ID NO: 1816 - protein, 25 aa, synthetic construct
  REGION 1..25: note = Synthetic
MVVTSVAMKPYEVTPTRMLVCGIAA

SEQ ID NO: 1817 - protein, 12 aa, synthetic construct
  REGION 1..12: note = Synthetic
PALELIRMVECS

SEQ ID NO: 1818 - protein, 14 aa, synthetic construct
  REGION 1..14: note = Synthetic
PALELIRMVECSGK

SEQ ID NO: 1819 - protein, 12 aa, synthetic construct
  REGION 1..12: note = Synthetic
PFCFGKDLKRPG

SEQ ID NO: 1820 - protein, 12 aa, synthetic construct
  REGION 1..12: note = Synthetic
PGSSPMEVMLRA

SEQ ID NO: 1821 - protein, 14 aa, synthetic construct
  REGION 1..14: note = Synthetic
PGSSPMEVMLRAVF

SEQ ID NO: 1822 - protein, 9 aa, synthetic construct
  REGION 1..9: note = Synthetic
PKQLTFEGK

SEQ ID NO: 1823 - protein, 12 aa, synthetic construct
  REGION 1..12: note = Synthetic
PLRMFLGPKQLT

SEQ ID NO: 1824 - protein, 12 aa, synthetic construct
  REGION 1..12: note = Synthetic
PTRMLVCGIAAK

SEQ ID NO: 1825 - protein, 12 aa, synthetic construct
  REGION 1..12: note = Synthetic
PYVLVKTNMVVT

SEQ ID NO: 1826 - protein, 25 aa, synthetic construct
  REGION 1..25: note = Synthetic
QLTFEGKPALELIRMVECSGKQDCP

SEQ ID NO: 1827 - protein, 12 aa, synthetic construct
  REGION 1..12: note = Synthetic
QRPLRMFLGPKQ

SEQ ID NO: 1828 - protein, 12 aa, synthetic construct
  REGION 1..12: note = Synthetic
RAVFMQQRPLRM

SEQ ID NO: 1829 - protein, 12 aa, synthetic construct
  REGION 1..12: note = Synthetic
RMFLGPKQLTFE

SEQ ID NO: 1830 - protein, 12 aa, synthetic construct
  REGION 1..12: note = Synthetic
RMLVCGIAAKLG

SEQ ID NO: 1831 - protein, 12 aa, synthetic construct
  REGION 1..12: note = Synthetic
RMVECSGKQDCP

SEQ ID NO: 1832 - protein, 12 aa, synthetic construct
  REGION 1..12: note = Synthetic
SPDAHVPFCFGK

SEQ ID NO: 1833 - protein, 12 aa, synthetic construct
  REGION 1..12: note = Synthetic
SSPMEVMLRAVF

SEQ ID NO: 1834 - protein, 25 aa, synthetic construct
  REGION 1..25: note = Synthetic
SSPMEVMLRAVFMQQRPLRMFLGPK

SEQ ID NO: 1835 - protein, 12 aa, synthetic construct
  REGION 1..12: note = Synthetic
SVAMKPYEVTPT

SEQ ID NO: 1836 - protein, 10 aa, synthetic construct
  REGION 1..10: note = Synthetic
VECSGKQDCP

SEQ ID NO: 1837 - protein, 12 aa, synthetic construct
  REGION 1..12: note = Synthetic
VFMQQRPLRMFL

SEQ ID NO: 1838 - protein, 25 aa, synthetic construct
  REGION 1..25: note = Synthetic
VFMQQRPLRMFLGPKQLTFEGKPAL

SEQ ID NO: 1839 - protein, 12 aa, synthetic construct
  REGION 1..12: note = Synthetic
VKTNMVVTSVAM

SEQ ID NO: 1840 - protein, 12 aa, synthetic construct
  REGION 1..12: note = Synthetic
VLVKTNMVVTSV

SEQ ID NO: 1841 - protein, 12 aa, synthetic construct
  REGION 1..12: note = Synthetic
VTPTRMLVCGIA

SEQ ID NO: 1842 - protein, 12 aa, synthetic construct
  REGION 1..12: note = Synthetic
VTSVAMKPYEVT

SEQ ID NO: 1843 - protein, 12 aa, synthetic construct
  REGION 1..12: note = Synthetic
YEVTPTRMLVCG

SEQ ID NO: 1844 - protein, 25 aa, synthetic construct
  REGION 1..25: note = Synthetic
YEVTPTRMLVCGIAAKLGAAASSPD

SEQ ID NO: 1845 - protein, 17 aa, synthetic construct
  REGION 1..17: note = Synthetic
CASPYEGRYRDMYDALR

SEQ ID NO: 1846 - protein, 11 aa, synthetic construct
  REGION 1..11: note = Synthetic
CAVFVRDGQSV

SEQ ID NO: 1847 - protein, 9 aa, synthetic construct
  REGION 1..9: note = Synthetic
CITTIYKTG

SEQ ID NO: 1848 - protein, 10 aa, synthetic construct
  REGION 1..10: note = Synthetic
CPNGTRALTV

SEQ ID NO: 1849 - protein, 14 aa, synthetic construct
  REGION 1..14: note = Synthetic
DALRRLLYMIYMSG

SEQ ID NO: 1850 - protein, 26 aa, synthetic construct
  REGION 1..26: note = Synthetic
GNRGRGQRRDWSRAPPPPEERQETRS

SEQ ID NO: 1851 - protein, 13 aa, synthetic construct
  REGION 1..13: note = Synthetic
GQPAADHYYSKVT

SEQ ID NO: 1852 - protein, 19 aa, synthetic construct
  REGION 1..19: note = Synthetic
GSPNCHGPDWASPVCQRHS

SEQ ID NO: 1853 - protein, 17 aa, synthetic construct
  REGION 1..17: note = Synthetic
HKSLSTNLDVTNSIEHQ

SEQ ID NO: 1854 - protein, 12 aa, synthetic construct
  REGION 1..12: note = Synthetic
LFTQQGGAYGRC

SEQ ID NO: 1855 - protein, 22 aa, synthetic construct
  REGION 1..22: note = Synthetic
LIGLLAIAGIRLHRAAIYTAEI

SEQ ID NO: 1856 - protein, 15 aa, synthetic construct
  REGION 1..15: note = Synthetic
PDTAADSELRRWIKY

SEQ ID NO: 1857 - protein, 17 aa, synthetic construct
  REGION 1..17: note = Synthetic
PNCHGPDWASPVCQRHS

SEQ ID NO: 1858 - protein, 24 aa, synthetic construct
  REGION 1..24: note = Synthetic
QTPAPKPSRAPPQQPQPPRMQTGR

SEQ ID NO: 1859 - protein, 18 aa, synthetic construct
  REGION 1..18: note = Synthetic
RAGLTAGASQSRRPRPPR

SEQ ID NO: 1860 - protein, 24 aa, synthetic construct
  REGION 1..24: note = Synthetic
RFGAPQAFLAGLLLAAVAVGTARA

SEQ ID NO: 1861 - protein, 16 aa, synthetic construct
  REGION 1..16: note = Synthetic
RGNAELQTYLRQITPG

SEQ ID NO: 1862 - protein, 15 aa, synthetic construct
  REGION 1..15: note = Synthetic
RVHVSKEEQYYDYED

SEQ ID NO: 1863 - protein, 11 aa, synthetic construct
  REGION 1..11: note = Synthetic
SIYGLYDGTYL

SEQ ID NO: 1864 - protein, 14 aa, synthetic construct
  REGION 1..14: note = Synthetic
SKVTATRLLASTNS

SEQ ID NO: 1865 - protein, 16 aa, synthetic construct
  REGION 1..16: note = Synthetic
TQQGGAYGRCPNGTRA

SEQ ID NO: 1866 - protein, 12 aa, synthetic construct
  REGION 1..12: note = Synthetic
VAPGIVIPPKAL

SEQ ID NO: 1867 - protein, 17 aa, synthetic construct
  REGION 1..17: note = Synthetic
DSRPPEDVFQNGFTAWG

SEQ ID NO: 1868 - protein, 15 aa, synthetic construct
  REGION 1..15: note = Synthetic
EHRMQEAVEAERAGR

SEQ ID NO: 1869 - protein, 22 aa, synthetic construct
  REGION 1..22: note = Synthetic
ETCFQQACKGKIQALCENPEWA

SEQ ID NO: 1870 - protein, 22 aa, synthetic construct
  REGION 1..22: note = Synthetic
EYVDTYGDNAGRILAGALATYQ

SEQ ID NO: 1871 - protein, 14 aa, synthetic construct
  REGION 1..14: note = Synthetic
HRRIPPENIRRVTR

SEQ ID NO: 1872 - protein, 9 aa, synthetic construct
  REGION 1..9: note = Synthetic
MARQAESSE

SEQ ID NO: 1873 - protein, 12 aa, synthetic construct
  REGION 1..12: note = Synthetic
MQEAVEAERAGR

SEQ ID NO: 1874 - protein, 15 aa, synthetic construct
  REGION 1..15: note = Synthetic
SQQTRANPNPYTSRR

SEQ ID NO: 1875 - protein, 24 aa, synthetic construct
  REGION 1..24: note = Synthetic
TRANPNPYTSRRSVASIVGTLVHG

SEQ ID NO: 1876 - protein, 12 aa, synthetic construct
  REGION 1..12: note = Synthetic
TVYRYDSRPPED

SEQ ID NO: 1877 - protein, 7 aa, synthetic construct
  REGION 1..7: note = Synthetic
NDRNLLD

SEQ ID NO: 1878 - protein, 29 aa, synthetic construct
  REGION 1..29: note = Synthetic
NMEDEADQYFSHDDPISSDQSRFGWFENK

SEQ ID NO: 1879 - protein, 20 aa, synthetic construct
  REGION 1..20: note = Synthetic
SRASDARAAHLPTGTPLDID

SEQ ID NO: 1880 - protein, 11 aa, synthetic construct
  REGION 1..11: note = Synthetic
EDVFQNGFTAW

SEQ ID NO: 1881 - protein, 17 aa, synthetic construct
  REGION 1..17: note = Synthetic
AEGSSSVEYINNWEQAK

SEQ ID NO: 1882 - protein, 14 aa, synthetic construct
  REGION 1..14: note = Synthetic
GPIKNKMSESPNKT

SEQ ID NO: 1883 - protein, 32 aa, synthetic construct
  REGION 1..32: note = Synthetic
GPKLTGALIGILSLFVESPGQLIQRITDDPDV

SEQ ID NO: 1884 - protein, 14 aa, synthetic construct
  REGION 1..14: note = Synthetic
GYQKTVDHTKVNSK

SEQ ID NO: 1885 - protein, 5 aa, synthetic construct
  REGION 1..5: note = Synthetic
KTVDH

SEQ ID NO: 1886 - protein, 6 aa, synthetic construct
  REGION 1..6: note = Synthetic
SESPNK

SEQ ID NO: 1887 - protein, 20 aa, synthetic construct
  REGION 1..20: note = Synthetic
AEGSSSVEYINNWEQAKALS

SEQ ID NO: 1888 - protein, 20 aa, synthetic construct
  REGION 1..20: note = Synthetic
AQAIPLVGELVDIGFAAYNF

SEQ ID NO: 1889 - protein, 20 aa, synthetic construct
  REGION 1..20: note = Synthetic
ASRVVLSLPFAEGSSSVEYI

SEQ ID NO: 1890 - protein, 20 aa, synthetic construct
  REGION 1..20: note = Synthetic
CINLDWDVIRDKTKTKIESL

SEQ ID NO: 1891 - protein, 20 aa, synthetic construct
  REGION 1..20: note = Synthetic
CRAIDGDVTFCRPKSPVYVG

SEQ ID NO: 1892 - protein, 20 aa, synthetic construct
  REGION 1..20: note = Synthetic
CRPKSPVYVGNGVHANLHVA

SEQ ID NO: 1893 - protein, 20 aa, synthetic construct
  REGION 1..20: note = Synthetic
DAAGYSVDNENPLSGKAGGV

SEQ ID NO: 1894 - protein, 20 aa, synthetic construct
  REGION 1..20: note = Synthetic
DKTKTKIESLKEHGPIKNKM

SEQ ID NO: 1895 - protein, 20 aa, synthetic construct
  REGION 1..20: note = Synthetic
EEFIKRFGDGASRVVLSLPF

SEQ ID NO: 1896 - protein, 20 aa, synthetic construct
  REGION 1..20: note = Synthetic
EKAKQYLEEFHQTALEHPEL

SEQ ID NO: 1897 - protein, 20 aa, synthetic construct
  REGION 1..20: note = Synthetic
FHRSSSEKIHSNEISSDSIG

SEQ ID NO: 1898 - protein, 20 aa, synthetic construct
  REGION 1..20: note = Synthetic
GADDVVDSSKSFVMENFSSY

SEQ ID NO: 1899 - protein, 20 aa, synthetic construct
  REGION 1..20: note = Synthetic
GKRGQDAMYEYMAQACAGNR

SEQ ID NO: 1900 - protein, 20 aa, synthetic construct
  REGION 1..20: note = Synthetic
GSVMGIADGAVHHNTEEIVA

SEQ ID NO: 1901 - protein, 20 aa, synthetic construct
  REGION 1..20: note = Synthetic
GTQGNYDDDWKGFYSTDNKY

SEQ ID NO: 1902 - protein, 20 aa, synthetic construct
  REGION 1..20: note = Synthetic
HDGYAVSWNTVEDSIIRTGF

SEQ ID NO: 1903 - protein, 20 aa, synthetic construct
  REGION 1..20: note = Synthetic
HGTKPGYVDSIQKGIQKPKS

SEQ ID NO: 1904 - protein, 20 aa, synthetic construct
  REGION 1..20: note = Synthetic
HQTALEHPELSELKTVTGTN

SEQ ID NO: 1905 - protein, 20 aa, synthetic construct
  REGION 1..20: note = Synthetic
IQKGIQKPKSGTQGNYDDDW

SEQ ID NO: 1906 - protein, 20 aa, synthetic construct
  REGION 1..20: note = Synthetic
KEHGPIKNKMSESPNKTVSE

SEQ ID NO: 1907 - protein, 20 aa, synthetic construct
  REGION 1..20: note = Synthetic
KGFYSTDNKYDAAGYSVDNE

SEQ ID NO: 1908 - protein, 20 aa, synthetic construct
  REGION 1..20: note = Synthetic
LDVNKSKTHISVNGRKIRMR

SEQ ID NO: 1909 - protein, 18 aa, synthetic construct
  REGION 1..18: note = Synthetic
MASTIPITMEDLQKALEA

SEQ ID NO: 1910 - protein, 20 aa, synthetic construct
  REGION 1..20: note = Synthetic
NGVHANLHVAFHRSSSEKIH

SEQ ID NO: 1911 - protein, 20 aa, synthetic construct
  REGION 1..20: note = Synthetic
NNWEQAKALSVELEINFETR

SEQ ID NO: 1912 - protein, 20 aa, synthetic construct
  REGION 1..20: note = Synthetic
NPLSGKAGGVVKVTYPGLTK

SEQ ID NO: 1913 - protein, 20 aa, synthetic construct
  REGION 1..20: note = Synthetic
PVFAGANYAAWAVNVAQVID

SEQ ID NO: 1914 - protein, 20 aa, synthetic construct
  REGION 1..20: note = Synthetic
SELKTVTGTNPVFAGANYAA

SEQ ID NO: 1915 - protein, 20 aa, synthetic construct
  REGION 1..20: note = Synthetic
SESPNKTVSEEKAKQYLEEF

SEQ ID NO: 1916 - protein, 20 aa, synthetic construct
  REGION 1..20: note = Synthetic
SETADNLEKTTAALSILPGI

SEQ ID NO: 1917 - protein, 20 aa, synthetic construct
  REGION 1..20: note = Synthetic
SFVMENFSSYHGTKPGYVDS

SEQ ID NO: 1918 - protein, 20 aa, synthetic construct
  REGION 1..20: note = Synthetic
SNEISSDSIGVLGYQKTVDH

SEQ ID NO: 1919 - protein, 20 aa, synthetic construct
  REGION 1..20: note = Synthetic
SPGHKTQPFLHDGYAVSWNT

SEQ ID NO: 1920 - protein, 20 aa, synthetic construct
  REGION 1..20: note = Synthetic
SVNGRKIRMRCRAIDGDVTF

SEQ ID NO: 1921 - protein, 20 aa, synthetic construct
  REGION 1..20: note = Synthetic
TAALSILPGIGSVMGIADGA

SEQ ID NO: 1922 - protein, 20 aa, synthetic construct
  REGION 1..20: note = Synthetic
TAENTPLPIAGVLLPTIPGK

SEQ ID NO: 1923 - protein, 20 aa, synthetic construct
  REGION 1..20: note = Synthetic
TEPLMEQVGTEEFIKRFGDG

SEQ ID NO: 1924 - protein, 20 aa, synthetic construct
  REGION 1..20: note = Synthetic
TIKKELGLSLTEPLMEQVGT

SEQ ID NO: 1925 - protein, 15 aa, synthetic construct
  REGION 1..15: note = Synthetic
TKVNSKLSLFFEIKS

SEQ ID NO: 1926 - protein, 20 aa, synthetic construct
  REGION 1..20: note = Synthetic
VEDSIIRTGFQGESGHDIKI

SEQ ID NO: 1927 - protein, 20 aa, synthetic construct
  REGION 1..20: note = Synthetic
VELEINFETRGKRGQDAMYE

SEQ ID NO: 1928 - protein, 20 aa, synthetic construct
  REGION 1..20: note = Synthetic
VESIINLFQVVHNSYNRPAY

SEQ ID NO: 1929 - protein, 20 aa, synthetic construct
  REGION 1..20: note = Synthetic
VHNSYNRPAYSPGHKTQPFL

SEQ ID NO: 1930 - protein, 20 aa, synthetic construct
  REGION 1..20: note = Synthetic
VKVTYPGLTKVLALKVDNAE

SEQ ID NO: 1931 - protein, 20 aa, synthetic construct
  REGION 1..20: note = Synthetic
VLALKVDNAETIKKELGLSL

SEQ ID NO: 1932 - protein, 20 aa, synthetic construct
  REGION 1..20: note = Synthetic
VLGYQKTVDHTKVNSKLSLF

SEQ ID NO: 1933 - protein, 20 aa, synthetic construct
  REGION 1..20: note = Synthetic
VRRSVGSSLSCINLDWDVIR

SEQ ID NO: 1934 - protein, 20 aa, synthetic construct
  REGION 1..20: note = Synthetic
WAVNVAQVIDSETADNLEKT

SEQ ID NO: 1935 - protein, 20 aa, synthetic construct
  REGION 1..20: note = Synthetic
YMAQACAGNRVRRSVGSSLS

SEQ ID NO: 1936 - protein, 15 aa, synthetic construct
  REGION 1..15: note = Synthetic
AKAPPAPKPAPQPGP

SEQ ID NO: 1937 - protein, 10 aa, synthetic construct
  REGION 1..10: note = Synthetic
APKPAPQPGP

SEQ ID NO: 1938 - protein, 15 aa, synthetic construct
  REGION 1..15: note = Synthetic
APKPAPQPGPQPPQP

SEQ ID NO: 1939 - protein, 15 aa, synthetic construct
  REGION 1..15: note = Synthetic
AQTRTPLQCTMTEIF

SEQ ID NO: 1940 - protein, 19 aa, synthetic construct
  REGION 1..19: note = Synthetic
ASRGTNMEDEADQYFSHDD

SEQ ID NO: 1941 - protein, 5 aa, synthetic construct
  REGION 1..5: note = Synthetic
ATIRR

SEQ ID NO: 1942 - protein, 5 aa, synthetic construct
  REGION 1..5: note = Synthetic
DNRAG

SEQ ID NO: 1943 - protein, 15 aa, synthetic construct
  REGION 1..15: note = Synthetic
EAPAPQPPAGRELSA

SEQ ID NO: 1944 - protein, 20 aa, synthetic construct
  REGION 1..20: note = Synthetic
EMVRRSAGKVSSTLASELGI

SEQ ID NO: 1945 - protein, 5 aa, synthetic construct
  REGION 1..5: note = Synthetic
GASEL

SEQ ID NO: 1946 - protein, 10 aa, synthetic construct
  REGION 1..10: note = Synthetic
GDALAGGAVP

SEQ ID NO: 1947 - protein, 10 aa, synthetic construct
  REGION 1..10: note = Synthetic
GDAPAGGAVP

SEQ ID NO: 1948 - protein, 7 aa, synthetic construct
  REGION 1..7: note = Synthetic
GDTWDDD

SEQ ID NO: 1949 - protein, 5 aa, synthetic construct
  REGION 1..5: note = Synthetic
GERQH

SEQ ID NO: 1950 - protein, 5 aa, synthetic construct
  REGION 1..5: note = Synthetic
GGAVP

SEQ ID NO: 1951 - protein, 5 aa, synthetic construct
  REGION 1..5: note = Synthetic
GGFGP

SEQ ID NO: 1952 - protein, 10 aa, synthetic construct
  REGION 1..10: note = Synthetic
GGFGPGGFGP

SEQ ID NO: 1953 - protein, 10 aa, synthetic construct
  REGION 1..10: note = Synthetic
GGFGPVLDGW

SEQ ID NO: 1954 - protein, 20 aa, synthetic construct
  REGION 1..20: note = Synthetic
GGKEDRRVKQSRGEARESYR

SEQ ID NO: 1955 - protein, 6 aa, synthetic construct
  REGION 1..6: note = Synthetic
GILLEN

SEQ ID NO: 1956 - protein, 6 aa, synthetic construct
  REGION 1..6: note = Synthetic
GIRRFL

SEQ ID NO: 1957 - protein, 20 aa, synthetic construct
  REGION 1..20: note = Synthetic
HDDPISSDQSRFGWFENKEI

SEQ ID NO: 1958 - protein, 17 aa, synthetic construct
  REGION 1..17: note = Synthetic
HEFAGELSTLESLMNLY

SEQ ID NO: 1959 - protein, 8 aa, synthetic construct
  REGION 1..8: note = Synthetic
HLGGLAGY

SEQ ID NO: 1960 - protein, 21 aa, synthetic construct
  REGION 1..21: note = Synthetic
HTTEDKISRAVGPRQAQVSFL

SEQ ID NO: 1961 - protein, 20 aa, synthetic construct
  REGION 1..20: note = Synthetic
ICDIDTYIVEAGLASFILTI

SEQ ID NO: 1962 - protein, 20 aa, synthetic construct
  REGION 1..20: note = Synthetic
IIIVPIPGDSSITTRSRLLD

SEQ ID NO: 1963 - protein, 20 aa, synthetic construct
  REGION 1..20: note = Synthetic
ILDIKRTPGNKPRIAEMICD

SEQ ID NO: 1964 - protein, 6 aa, synthetic construct
  REGION 1..6: note = Synthetic
KALLYR

SEQ ID NO: 1965 - protein, 20 aa, synthetic construct
  REGION 1..20: note = Synthetic
KPPITSGSGGAIRGIKHIII

SEQ ID NO: 1966 - protein, 6 aa, synthetic construct
  REGION 1..6: note = Synthetic
LAGSGL

SEQ ID NO: 1967 - protein, 20 aa, synthetic construct
  REGION 1..20: note = Synthetic
LGITAEDARLVSEIAMHTTE

SEQ ID NO: 1968 - protein, 18 aa, synthetic construct
  REGION 1..18: note = Synthetic
LGTILAQIWVLLAKAVTA

SEQ ID NO: 1969 - protein, 18 aa, synthetic construct
  REGION 1..18: note = Synthetic
LPTGTPLDIDTASESSQD

SEQ ID NO: 1970 - protein, 17 aa, synthetic construct
  REGION 1..17: note = Synthetic
MATLLRSLALFKRNKDK

SEQ ID NO: 1971 - protein, 6 aa, synthetic construct
  REGION 1..6: note = Synthetic
PAPQPP

SEQ ID NO: 1972 - protein, 20 aa, synthetic construct
  REGION 1..20: note = Synthetic
PDTAADSELRRWIKYTQQRR

SEQ ID NO: 1973 - protein, 20 aa, synthetic construct
  REGION 1..20: note = Synthetic
PKLTGALIGILSLFVESPGQ

SEQ ID NO: 1974 - skipped

SEQ ID NO: 1975 - protein, 5 aa, synthetic construct
  REGION 1..5: note = Synthetic
PQPGP

SEQ ID NO: 1976 - protein, 15 aa, synthetic construct
  REGION 1..15: note = Synthetic
PQPGPQPPQPPQPQP

SEQ ID NO: 1977 - protein, 20 aa, synthetic construct
  REGION 1..20: note = Synthetic
QDPQDSRRSAEPLLSCKPWQ

SEQ ID NO: 1978 - protein, 19 aa, synthetic construct
  REGION 1..19: note = Synthetic
QRRVVGEFRLERKWLDVVR

SEQ ID NO: 1979 - protein, 5 aa, synthetic construct
  REGION 1..5: note = Synthetic
RELSA

SEQ ID NO: 1980 - protein, 5 aa, synthetic construct
  REGION 1..5: note = Synthetic
RFAPQ

SEQ ID NO: 1981 - protein, 20 aa, synthetic construct
  REGION 1..20: note = Synthetic
SIQNKFSAGSYPLLWSYAMG

SEQ ID NO: 1982 - protein, 9 aa, synthetic construct
  REGION 1..9: note = Synthetic
SITLQAGAH

SEQ ID NO: 1983 - protein, 6 aa, synthetic construct
  REGION 1..6: note = Synthetic
SLQPED

SEQ ID NO: 1984 - protein, 8 aa, synthetic construct
  REGION 1..8: note = Synthetic
SNALSKRL

SEQ ID NO: 1985 - protein, 20 aa, synthetic construct
  REGION 1..20: note = Synthetic
SPGQLIQRITDDPDVSIRLL

SEQ ID NO: 1986 - protein, 8 aa, synthetic construct
  REGION 1..8: note = Synthetic
TELPSIPG

SEQ ID NO: 1987 - protein, 7 aa, synthetic construct
  REGION 1..7: note = Synthetic
TFTLANK

SEQ ID NO: 1988 - protein, 5 aa, synthetic construct
  REGION 1..5: note = Synthetic
TWDDD

SEQ ID NO: 1989 - protein, 20 aa, synthetic construct
  REGION 1..20: note = Synthetic
VSFLQGDQSENELPRLGGKE

SEQ ID NO: 1990 - protein, 17 aa, synthetic construct
  REGION 1..17: note = Synthetic
WQESRKNKAQTRTPLQC

SEQ ID NO: 1991 - protein, 20 aa, synthetic construct
  REGION 1..20: note = Synthetic
YAMGVGVELENSMGGLNFGR

SEQ ID NO: 1992 - protein, 18 aa, synthetic construct
  REGION 1..18: note = Synthetic
YQQMGKPAPYMVNLENSI

SEQ ID NO: 1993 - protein, 15 aa, synthetic construct
  REGION 1..15: note = Synthetic
MTRSSHQSLVIKLMP

SEQ ID NO: 1994 - protein, 15 aa, synthetic construct
  REGION 1..15: note = Synthetic
PIRDALNAMTQNIRP

SEQ ID NO: 1995 - protein, 24 aa, synthetic construct
  REGION 1..24: note = Synthetic
ALLNTPPPYQVSCGGESDRASAGH

SEQ ID NO: 1996 - protein, 21 aa, synthetic construct
  REGION 1..21: note = Synthetic
GLGSPNCHGPDWASPVCQRHS

SEQ ID NO: 1997 - protein, 28 aa, synthetic construct
  REGION 1..28: note = Synthetic
GLGSPNCHGPDWASPVCQRHSPDCSRLV

SEQ ID NO: 1998 - protein, 26 aa, synthetic construct
  REGION 1..26: note = Synthetic
NYTGNQQSRWGLGSPNCHGPDWASPV

SEQ ID NO: 1999 - protein, 20 aa, synthetic construct
  REGION 1..20: note = Synthetic
TLPQPPCAHGQHYGHHHHQL

SEQ ID NO: 2000 - protein, 26 aa, synthetic construct
  REGION 1..26: note = Synthetic
TVRVKFHTETRTVWQLSVAGVSCNVT

SEQ ID NO: 2001 - protein, 15 aa, synthetic construct
  REGION 1..15: note = Synthetic
ASYFNPGGSYYKQYH

SEQ ID NO: 2002 - protein, 15 aa, synthetic construct
  REGION 1..15: note = Synthetic
FALASYVQHPHKTVR

SEQ ID NO: 2003 - protein, 21 aa, synthetic construct
  REGION 1..21: note = Synthetic
GGESDRASARVIDPAAQSFTG

SEQ ID NO: 2004 - protein, 18 aa, synthetic construct
  REGION 1..18: note = Synthetic
GPGEVWVTPVIGSQARKC

SEQ ID NO: 2005 - protein, 14 aa, synthetic construct
  REGION 1..14: note = Synthetic
GSQARKCGLHIRAG

SEQ ID NO: 2006 - protein, 25 aa, synthetic construct
  REGION 1..25: note = Synthetic
LVGATPERPRLRLVDADDPLLRTAP

SEQ ID NO: 2007 - protein, 14 aa, synthetic construct
  REGION 1..14: note = Synthetic
TAPGPGEVWVTPVI

SEQ ID NO: 2008 - protein, 15 aa, synthetic construct
  REGION 1..15: note = Synthetic
FIVLSIAYPTLSEIK

SEQ ID NO: 2009 - protein, 32 aa, synthetic construct
  REGION 1..32: note = Synthetic
ETCFQQACKGKIQALCENPEWAPLKDNRIPSY

SEQ ID NO: 2010 - protein, 10 aa, synthetic construct
  REGION 1..10: note = Synthetic
LPRLGGKEDR

SEQ ID NO: 2011 - protein, 10 aa, synthetic construct
  REGION 1..10: note = Synthetic
MSKTEWNASQ

SEQ ID NO: 2012 - protein, 10 aa, synthetic construct
  REGION 1..10: note = Synthetic
SRFGWFENKE

SEQ ID NO: 2013 - protein, 29 aa, synthetic construct
  REGION 1..29: note = Synthetic
EACVTSWLWSEGEGAVFYRVDLHFINLGT

SEQ ID NO: 2014 - protein, 21 aa, synthetic construct
  REGION 1..21: note = Synthetic
MDFWCVEHDRPPPATPTSLTT

SEQ ID NO: 2015 - protein, 25 aa, synthetic construct
  REGION 1..25: note = Synthetic
PFLGHDGHHGGTLRVGQHHRNASDV

SEQ ID NO: 2016 - protein, 21 aa, synthetic construct
  REGION 1..21: note = Synthetic
RVKFHTETRTVWQLSVAGVSC

SEQ ID NO: 2017 - protein, 13 aa, synthetic construct
  REGION 1..13: note = Synthetic
AEEQARHVKNGLE

SEQ ID NO: 2018 - protein, 13 aa, synthetic construct
  REGION 1..13: note = Synthetic
ESPQEISKHQALG

SEQ ID NO: 2019 - protein, 15 aa, synthetic construct
  REGION 1..15: note = Synthetic
GVGVELENSMGGLNF

SEQ ID NO: 2020 - protein, 20 aa, synthetic construct
  REGION 1..20: note = Synthetic
IKGANDLAKFHQMLMKIIMK

SEQ ID NO: 2021 - protein, 14 aa, synthetic construct
  REGION 1..14: note = Synthetic
MSKTLHAQLGFKKT

SEQ ID NO: 2022 - protein, 13 aa, synthetic construct
  REGION 1..13: note = Synthetic
NASGLSRPSPSAH

SEQ ID NO: 2023 - protein, 14 aa, synthetic construct
  REGION 1..14: note = Synthetic
VRVIDPSLGDRKDE

SEQ ID NO: 2024 - protein, 9 aa, synthetic construct
  REGION 1..9: note = Synthetic
DLSDGDLLV

SEQ ID NO: 2025 - protein, 10 aa, synthetic construct
  REGION 1..10: note = Synthetic
EAERAGRGTG

SEQ ID NO: 2026 - protein, 11 aa, synthetic construct
  REGION 1..11: note = Synthetic
YRYDSRPPEDV

SEQ ID NO: 2027 - protein, 10 aa, synthetic construct
  REGION 1..10: note = Synthetic
YVDTYGDNAG

SEQ ID NO: 2028 - protein, 9 aa, synthetic construct
  REGION 1..9: note = Synthetic
SFSYFYPFR

SEQ ID NO: 2029 - protein, 8 aa, synthetic construct
  REGION 1..8: note = Synthetic
DIFIVSPR

SEQ ID NO: 2030 - protein, 37 aa, synthetic construct
  REGION 1..37: note = Synthetic
QDSRRSADALLRLQAMAGISEEQGSDTDTPIVYNDRN

SEQ ID NO: 2031 - protein, 10 aa, synthetic construct
  REGION 1..10: note = Synthetic
SAEALLRLQA

SEQ ID NO: 2032 - protein, 9 aa, synthetic construct
  REGION 1..9: note = Synthetic
RIVINREHL

SEQ ID NO: 2033 - protein, 5 aa, synthetic construct
  REGION 1..5: note = Synthetic
IPRFK

SEQ ID NO: 2034 - protein, 9 aa, synthetic construct
  REGION 1..9: note = Synthetic
AAALSPMEI

SEQ ID NO: 2035 - protein, 10 aa, synthetic construct
  REGION 1..10: note = Synthetic
AAASVVGAPV

SEQ ID NO: 2036 - protein, 9 aa, synthetic construct
  REGION 1..9: note = Synthetic
AALGRQDSI

SEQ ID NO: 2037 - protein, 10 aa, synthetic construct
  REGION 1..10: note = Synthetic
AAQRLVHAIA

SEQ ID NO: 2038 - protein, 8 aa, synthetic construct
  REGION 1..8: note = Synthetic
AAVEAAEL

SEQ ID NO: 2039 - protein, 9 aa, synthetic construct
  REGION 1..9: note = Synthetic
AGANVLNGL

SEQ ID NO: 2040 - protein, 8 aa, synthetic construct
  REGION 1..8: note = Synthetic
AGYANAAD

SEQ ID NO: 2041 - protein, 10 aa, synthetic construct
  REGION 1..10: note = Synthetic
AGYEQFEFRV

SEQ ID NO: 2042 - protein, 9 aa, synthetic construct
  REGION 1..9: note = Synthetic
AITGNADNL

SEQ ID NO: 2043 - protein, 9 aa, synthetic construct
  REGION 1..9: note = Synthetic
AKEKNATLM

SEQ ID NO: 2044 - protein, 8 aa, synthetic construct
  REGION 1..8: note = Synthetic
AKGVFLSL

SEQ ID NO: 2045 - protein, 9 aa, synthetic construct
  REGION 1..9: note = Synthetic
APHEYGFGI

SEQ ID NO: 2046 - protein, 9 aa, synthetic construct
  REGION 1..9: note = Synthetic
ARQGNDLEI

SEQ ID NO: 2047 - protein, 8 aa, synthetic construct
  REGION 1..8: note = Synthetic
ASVVGAPV

SEQ ID NO: 2048 - protein, 8 aa, synthetic construct
  REGION 1..8: note = Synthetic
ATLMFRLV

SEQ ID NO: 2049 - protein, 8 aa, synthetic construct
  REGION 1..8: note = Synthetic
AVAAAQRL

SEQ ID NO: 2050 - protein, 10 aa, synthetic construct
  REGION 1..10: note = Synthetic
DAGANVLNGL

SEQ ID NO: 2051 - protein, 9 aa, synthetic construct
  REGION 1..9: note = Synthetic
DALLAQLYR

SEQ ID NO: 2052 - protein, 10 aa, synthetic construct
  REGION 1..10: note = Synthetic
DANGVLKHSI

SEQ ID NO: 2053 - protein, 9 aa, synthetic construct
  REGION 1..9: note = Synthetic
DGDMNIGVI

SEQ ID NO: 2054 - protein, 9 aa, synthetic construct
  REGION 1..9: note = Synthetic
DHVKNIENL

SEQ ID NO: 2055 - protein, 8 aa, synthetic construct
  REGION 1..8: note = Synthetic
DIDMFAIM

SEQ ID NO: 2056 - protein, 9 aa, synthetic construct
  REGION 1..9: note = Synthetic
DMFAIMPHL

SEQ ID NO: 2057 - protein, 9 aa, synthetic construct
  REGION 1..9: note = Synthetic
DNVRNVENV

SEQ ID NO: 2058 - protein, 10 aa, synthetic construct
  REGION 1..10: note = Synthetic
DNVRNVENVI

SEQ ID NO: 2059 - protein, 8 aa, synthetic construct
  REGION 1..8: note = Synthetic
DTVDYSAM

SEQ ID NO: 2060 - protein, 9 aa, synthetic construct
  REGION 1..9: note = Synthetic
DTVDYSAMI

SEQ ID NO: 2061 - protein, 8 aa, synthetic construct
  REGION 1..8: note = Synthetic
DYLRQAGL

SEQ ID NO: 2062 - protein, 9 aa, synthetic construct
  REGION 1..9: note = Synthetic
DYYDNVRNV

SEQ ID NO: 2063 - protein, 8 aa, synthetic construct
  REGION 1..8: note = Synthetic
EFTTFVEI

SEQ ID NO: 2064 - protein, 9 aa, synthetic construct
  REGION 1..9: note = Synthetic
EFTTFVEIV

SEQ ID NO: 2065 - protein, 8 aa, synthetic construct
  REGION 1..8: note = Synthetic
EGYVFYEN

SEQ ID NO: 2066 - protein, 8 aa, synthetic construct
  REGION 1..8: note = Synthetic
ENVQYRHV

SEQ ID NO: 2067 - protein, 9 aa, synthetic construct
  REGION 1..9: note = Synthetic
EQLANSDGL

SEQ ID NO: 2068 - protein, 10 aa, synthetic construct
  REGION 1..10: note = Synthetic
FGVGYGHDTI

SEQ ID NO: 2069 - protein, 10 aa, synthetic construct
  REGION 1..10: note = Synthetic
FSPDVLETVP

SEQ ID NO: 2070 - protein, 9 aa, synthetic construct
  REGION 1..9: note = Synthetic
FSVDHVKNI

SEQ ID NO: 2071 - protein, 9 aa, synthetic construct
  REGION 1..9: note = Synthetic
GDDTYLFGV

SEQ ID NO: 2072 - protein, 9 aa, synthetic construct
  REGION 1..9: note = Synthetic
GDDVFLQDL

SEQ ID NO: 2073 - protein, 9 aa, synthetic construct
  REGION 1..9: note = Synthetic
GEDGNDIFL

SEQ ID NO: 2074 - protein, 10 aa, synthetic construct
  REGION 1..10: note = Synthetic
GERFNVRKQL

SEQ ID NO: 2075 - protein, 9 aa, synthetic construct
  REGION 1..9: note = Synthetic
GGAGNDTLV

SEQ ID NO: 2076 - protein, 8 aa, synthetic construct
  REGION 1..8: note = Synthetic
GGDDFEAV

SEQ ID NO: 2077 - protein, 9 aa, synthetic construct
  REGION 1..9: note = Synthetic
GKSEFTTFV

SEQ ID NO: 2078 - protein, 9 aa, synthetic construct
  REGION 1..9: note = Synthetic
GKSLFDDGL

SEQ ID NO: 2079 - protein, 9 aa, synthetic construct
  REGION 1..9: note = Synthetic
GNADNLKSV

SEQ ID NO: 2080 - protein, 9 aa, synthetic construct
  REGION 1..9: note = Synthetic
GQLVEVDTL

SEQ ID NO: 2081 - protein, 9 aa, synthetic construct
  REGION 1..9: note = Synthetic
GRSKFSPDV

SEQ ID NO: 2082 - protein, 8 aa, synthetic construct
  REGION 1..8: note = Synthetic
GSSAYDTV

SEQ ID NO: 2083 - protein, 9 aa, synthetic construct
  REGION 1..9: note = Synthetic
GTVEKWPAL

SEQ ID NO: 2084 - protein, 8 aa, synthetic construct
  REGION 1..8: note = Synthetic
GVDYYDNV

SEQ ID NO: 2085 - protein, 9 aa, synthetic construct
  REGION 1..9: note = Synthetic
GYEQFEFRV

SEQ ID NO: 2086 - protein, 9 aa, synthetic construct
  REGION 1..9: note = Synthetic
HAVGAQDVV

SEQ ID NO: 2087 - protein, 10 aa, synthetic construct
  REGION 1..10: note = Synthetic
IAAGRIGLGI

SEQ ID NO: 2088 - protein, 9 aa, synthetic construct
  REGION 1..9: note = Synthetic
IGDAQANTL

SEQ ID NO: 2089 - protein, 9 aa, synthetic construct
  REGION 1..9: note = Synthetic
IGLGILADL

SEQ ID NO: 2090 - protein, 9 aa, synthetic construct
  REGION 1..9: note = Synthetic
IGNAAGIPL

SEQ ID NO: 2091 - protein, 9 aa, synthetic construct
  REGION 1..9: note = Synthetic
IGTSMKDVL

SEQ ID NO: 2092 - protein, 9 aa, synthetic construct
  REGION 1..9: note = Synthetic
IGVITDFEL

SEQ ID NO: 2093 - protein, 9 aa, synthetic construct
  REGION 1..9: note = Synthetic
IPLTADIDM

SEQ ID NO: 2094 - protein, 8 aa, synthetic construct
  REGION 1..8: note = Synthetic
ISKSALEL

SEQ ID NO: 2095 - protein, 8 aa, synthetic construct
  REGION 1..8: note = Synthetic
ITGNADNL

SEQ ID NO: 2096 - protein, 8 aa, synthetic construct
  REGION 1..8: note = Synthetic
KIFVVSAT

SEQ ID NO: 2097 - protein, 10 aa, synthetic construct
  REGION 1..10: note = Synthetic
KQLNNANVYR

SEQ ID NO: 2098 - protein, 9 aa, synthetic construct
  REGION 1..9: note = Synthetic
KVIGNAAGI

SEQ ID NO: 2099 - protein, 8 aa, synthetic construct
  REGION 1..8: note = Synthetic
LAKVVSQL

SEQ ID NO: 2100 - protein, 9 aa, synthetic construct
  REGION 1..9: note = Synthetic
LANDYARKI

SEQ ID NO: 2101 - protein, 9 aa, synthetic construct
  REGION 1..9: note = Synthetic
LDYLRQAGL

SEQ ID NO: 2102 - protein, 8 aa, synthetic construct
  REGION 1..8: note = Synthetic
LGKGFASL

SEQ ID NO: 2103 - protein, 9 aa, synthetic construct
  REGION 1..9: note = Synthetic
LGKGFASLM

SEQ ID NO: 2104 - protein, 8 aa, synthetic construct
  REGION 1..8: note = Synthetic
LGVDYYDN

SEQ ID NO: 2105 - protein, 9 aa, synthetic construct
  REGION 1..9: note = Synthetic
LGVDYYDNV

SEQ ID NO: 2106 - protein, 10 aa, synthetic construct
  REGION 1..10: note = Synthetic
LKHSIKLDVI

SEQ ID NO: 2107 - protein, 8 aa, synthetic construct
  REGION 1..8: note = Synthetic
LQAGYIPV

SEQ ID NO: 2108 - protein, 9 aa, synthetic construct
  REGION 1..9: note = Synthetic
LQLTGGTVE

SEQ ID NO: 2109 - protein, 8 aa, synthetic construct
  REGION 1..8: note = Synthetic
LSAAVFGL

SEQ ID NO: 2110 - protein, 10 aa, synthetic construct
  REGION 1..10: note = Synthetic
LSLGKGFASL

SEQ ID NO: 2111 - protein, 9 aa, synthetic construct
  REGION 1..9: note = Synthetic
LSPMEIYGL

SEQ ID NO: 2112 - protein, 10 aa, synthetic construct
  REGION 1..10: note = Synthetic
NAHDNFLAGG

SEQ ID NO: 2113 - protein, 9 aa, synthetic construct
  REGION 1..9: note = Synthetic
NANVYREGV

SEQ ID NO: 2114 - protein, 8 aa, synthetic construct
  REGION 1..8: note = Synthetic
NDTLYGGL

SEQ ID NO: 2115 - protein, 9 aa, synthetic construct
  REGION 1..9: note = Synthetic
NGLAGNDVL

SEQ ID NO: 2116 - protein, 10 aa, synthetic construct
  REGION 1..10: note = Synthetic
NNANVYREGV

SEQ ID NO: 2117 - protein, 8 aa, synthetic construct
  REGION 1..8: note = Synthetic
NTVSYAAL

SEQ ID NO: 2118 - protein, 10 aa, synthetic construct
  REGION 1..10: note = Synthetic
NVLRNIENAV

SEQ ID NO: 2119 - protein, 9 aa, synthetic construct
  REGION 1..9: note = Synthetic
PALTFITPL

SEQ ID NO: 2120 - protein, 10 aa, synthetic construct
  REGION 1..10: note = Synthetic
PETSNVLRNI

SEQ ID NO: 2121 - protein, 8 aa, synthetic construct
  REGION 1..8: note = Synthetic
PMEIYGLV

SEQ ID NO: 2122 - protein, 9 aa, synthetic construct
  REGION 1..9: note = Synthetic
PQAYFEKNL

SEQ ID NO: 2123 - protein, 9 aa, synthetic construct
  REGION 1..9: note = Synthetic
PVNPNLSKL

SEQ ID NO: 2124 - protein, 9 aa, synthetic construct
  REGION 1..9: note = Synthetic
QAGWNASSV

SEQ ID NO: 2125 - protein, 10 aa, synthetic construct
  REGION 1..10: note = Synthetic
QAGWNASSVI

SEQ ID NO: 2126 - protein, 9 aa, synthetic construct
  REGION 1..9: note = Synthetic
QDAANAGNL

SEQ ID NO: 2127 - protein, 10 aa, synthetic construct
  REGION 1..10: note = Synthetic
QDAANAGNLL

SEQ ID NO: 2128 - protein, 8 aa, synthetic construct
  REGION 1..8: note = Synthetic
QDSGYDSL

SEQ ID NO: 2129 - protein, 9 aa, synthetic construct
  REGION 1..9: note = Synthetic
QQSHYADQL

SEQ ID NO: 2130 - protein, 9 aa, synthetic construct
  REGION 1..9: note = Synthetic
RALQGAQAV

SEQ ID NO: 2131 - protein, 9 aa, synthetic construct
  REGION 1..9: note = Synthetic
RGGLGLDTL

SEQ ID NO: 2132 - protein, 9 aa, synthetic construct
  REGION 1..9: note = Synthetic
RKQLNNANV

SEQ ID NO: 2133 - protein, 9 aa, synthetic construct
  REGION 1..9: note = Synthetic
RQDSGYDSL

SEQ ID NO: 2134 - protein, 9 aa, synthetic construct
  REGION 1..9: note = Synthetic
RQFRYDGDM

SEQ ID NO: 2135 - protein, 9 aa, synthetic construct
  REGION 1..9: note = Synthetic
RSKFSPDVL

SEQ ID NO: 2136 - protein, 9 aa, synthetic construct
  REGION 1..9: note = Synthetic
SAGAAAGAL

SEQ ID NO: 2137 - protein, 9 aa, synthetic construct
  REGION 1..9: note = Synthetic
SAHWGQRAL

SEQ ID NO: 2138 - protein, 9 aa, synthetic construct
  REGION 1..9: note = Synthetic
SAMIHPGRI

SEQ ID NO: 2139 - protein, 10 aa, synthetic construct
  REGION 1..10: note = Synthetic
SAMIHPGRIV

SEQ ID NO: 2140 - protein, 9 aa, synthetic construct
  REGION 1..9: note = Synthetic
SAYDTVSGI

SEQ ID NO: 2141 - protein, 8 aa, synthetic construct
  REGION 1..8: note = Synthetic
SAYGYEGD

SEQ ID NO: 2142 - protein, 9 aa, synthetic construct
  REGION 1..9: note = Synthetic
SGGAGDDVL

SEQ ID NO: 2143 - protein, 8 aa, synthetic construct
  REGION 1..8: note = Synthetic
SGLQVAGA

SEQ ID NO: 2144 - protein, 9 aa, synthetic construct
  REGION 1..9: note = Synthetic
SGYDSLDGV

SEQ ID NO: 2145 - protein, 10 aa, synthetic construct
  REGION 1..10: note = Synthetic
SLLTGALNGI

SEQ ID NO: 2146 - protein, 8 aa, synthetic construct
  REGION 1..8: note = Synthetic
SPMEIYGL

SEQ ID NO: 2147 - protein, 9 aa, synthetic construct
  REGION 1..9: note = Synthetic
SQMLTRGQL

SEQ ID NO: 2148 - protein, 10 aa, synthetic construct
  REGION 1..10: note = Synthetic
SSAYDTVSGI

SEQ ID NO: 2149 - protein, 9 aa, synthetic construct
  REGION 1..9: note = Synthetic
SSLAHGHTA

SEQ ID NO: 2150 - protein, 9 aa, synthetic construct
  REGION 1..9: note = Synthetic
SSVTSGDSV

SEQ ID NO: 2151 - protein, 10 aa, synthetic construct
  REGION 1..10: note = Synthetic
SVIGVQTTEI

SEQ ID NO: 2152 - protein, 9 aa, synthetic construct
  REGION 1..9: note = Synthetic
TNTVSYAAL

SEQ ID NO: 2153 - protein, 8 aa, synthetic construct
  REGION 1..8: note = Synthetic
TSLIAEGV

SEQ ID NO: 2154 - protein, 8 aa, synthetic construct
  REGION 1..8: note = Synthetic
TSLLTGAL

SEQ ID NO: 2155 - protein, 8 aa, synthetic construct
  REGION 1..8: note = Synthetic
TVPASPGL

SEQ ID NO: 2156 - protein, 9 aa, synthetic construct
  REGION 1..9: note = Synthetic
VAKEKNATL

SEQ ID NO: 2157 - protein, 10 aa, synthetic construct
  REGION 1..10: note = Synthetic
VAPHEYGFGI

SEQ ID NO: 2158 - protein, 8 aa, synthetic construct
  REGION 1..8: note = Synthetic
VAVVTSLL

SEQ ID NO: 2159 - protein, 9 aa, synthetic construct
  REGION 1..9: note = Synthetic
VFYENRAYG

SEQ ID NO: 2160 - protein, 10 aa, synthetic construct
  REGION 1..10: note = Synthetic
VFYENRAYGV

SEQ ID NO: 2161 - protein, 9 aa, synthetic construct
  REGION 1..9: note = Synthetic
VITDFELEV

SEQ ID NO: 2162 - protein, 8 aa, synthetic construct
  REGION 1..8: note = Synthetic
VNPHSTSL

SEQ ID NO: 2163 - protein, 9 aa, synthetic construct
  REGION 1..9: note = Synthetic
VNPHSTSLI

SEQ ID NO: 2164 - protein, 8 aa, synthetic construct
  REGION 1..8: note = Synthetic
VNPNLSKL

SEQ ID NO: 2165 - protein, 9 aa, synthetic construct
  REGION 1..9: note = Synthetic
VNPNLSKLF

SEQ ID NO: 2166 - protein, 9 aa, synthetic construct
  REGION 1..9: note = Synthetic
VQQPIIEKL

SEQ ID NO: 2167 - protein, 8 aa, synthetic construct
  REGION 1..8: note = Synthetic
VQYRHVEL

SEQ ID NO: 2168 - protein, 9 aa, synthetic construct
  REGION 1..9: note = Synthetic
VSIAAAASV

SEQ ID NO: 2169 - protein, 10 aa, synthetic construct
  REGION 1..10: note = Synthetic
VSIAAAASVV

SEQ ID NO: 2170 - protein, 9 aa, synthetic construct
  REGION 1..9: note = Synthetic
VTSLLTGAL

SEQ ID NO: 2171 - protein, 9 aa, synthetic construct
  REGION 1..9: note = Synthetic
VVLANASRI

SEQ ID NO: 2172 - protein, 9 aa, synthetic construct
  REGION 1..9: note = Synthetic
WPALNLFSV

SEQ ID NO: 2173 - protein, 8 aa, synthetic construct
  REGION 1..8: note = Synthetic
WVRKASAL

SEQ ID NO: 2174 - protein, 10 aa, synthetic construct
  REGION 1..10: note = Synthetic
YAVQYRRKGG

SEQ ID NO: 2175 - protein, 9 aa, synthetic construct
  REGION 1..9: note = Synthetic
YGGLGDDTL

SEQ ID NO: 2176 - protein, 10 aa, synthetic construct
  REGION 1..10: note = Synthetic
YGLVQQSHYA

SEQ ID NO: 2177 - protein, 9 aa, synthetic construct
  REGION 1..9: note = Synthetic
YGYEGDALL

SEQ ID NO: 2178 - protein, 8 aa, synthetic construct
  REGION 1..8: note = Synthetic
YIPVNPNL

SEQ ID NO: 2179 - protein, 10 aa, synthetic construct
  REGION 1..10: note = Synthetic
YSAMIHPGRI

SEQ ID NO: 2180 - protein, 10 aa, synthetic construct
  REGION 1..10: note = Synthetic
YSQTGAHAGI

SEQ ID NO: 2181 - protein, 20 aa, synthetic construct
  REGION 1..20: note = Synthetic
AYNFVESIINLFQVVHNSYN

SEQ ID NO: 2182 - protein, 6 aa, synthetic construct
  REGION 1..6: note = Synthetic
SGTTIK

SEQ ID NO: 2183 - protein, 15 aa, synthetic construct
  REGION 1..15: note = Synthetic
RGHTLESAEGRKIFG

SEQ ID NO: 2184 - protein, 22 aa, synthetic construct
  REGION 1..22: note = Synthetic
AGAMTVRDVAAAADLALQAGDA

SEQ ID NO: 2185 - protein, 23 aa, synthetic construct
  REGION 1..23: note = Synthetic
AGAMTVRDVAAAADLALQAGDAL

SEQ ID NO: 2186 - protein, 30 aa, synthetic construct
  REGION 1..30: note = Synthetic
ALAAVLVNPHIFTRIGAAQTSLADGAAGPA

SEQ ID NO: 2187 - protein, 12 aa, synthetic construct
  REGION 1..12: note = Synthetic
ALSIDSMTALGA

SEQ ID NO: 2188 - protein, 15 aa, synthetic construct
  REGION 1..15: note = Synthetic
DLSAARGADISGEGR

SEQ ID NO: 2189 - protein, 12 aa, synthetic construct
  REGION 1..12: note = Synthetic
DQNRYEYIWGLY

SEQ ID NO: 2190 - protein, 12 aa, synthetic construct
  REGION 1..12: note = Synthetic
DYTVSADAIALA

SEQ ID NO: 2191 - protein, 16 aa, synthetic construct
  REGION 1..16: note = Synthetic
GPIVVEAGELVSHAGG

SEQ ID NO: 2192 - protein, 23 aa, synthetic construct
  REGION 1..23: note = Synthetic
GRPEGLKIGAHSATSVSGSFDAL

SEQ ID NO: 2193 - protein, 19 aa, synthetic construct
  REGION 1..19: note = Synthetic
ITVTSRGGFDNEGKMESNK

SEQ ID NO: 2194 - protein, 14 aa, synthetic construct
  REGION 1..14: note = Synthetic
LDQNRYEYIWGLYP

SEQ ID NO: 2195 - protein, 11 aa, synthetic construct
  REGION 1..11: note = Synthetic
LSAARGADISG

SEQ ID NO: 2196 - protein, 10 aa, synthetic construct
  REGION 1..10: note = Synthetic
NKIRLMGPLQ

SEQ ID NO: 2197 - protein, 12 aa, synthetic construct
  REGION 1..12: note = Synthetic
NKLGRIRAGEDM

SEQ ID NO: 2198 - protein, 20 aa, synthetic construct
  REGION 1..20: note = Synthetic
NKLGRIRAGEDMHLDAPRIE

SEQ ID NO: 2199 - protein, 12 aa, synthetic construct
  REGION 1..12: note = Synthetic
PHLRNTGQVVAG

SEQ ID NO: 2200 - protein, 17 aa, synthetic construct
  REGION 1..17: note = Synthetic
QVDLHDLSAARGADISG

SEQ ID NO: 2201 - protein, 12 aa, synthetic construct
  REGION 1..12: note = Synthetic
RDVAAAADLALQ

SEQ ID NO: 2202 - protein, 12 aa, synthetic construct
  REGION 1..12: note = Synthetic
SAARGADISGEG

SEQ ID NO: 2203 - protein, 15 aa, synthetic construct
  REGION 1..15: note = Synthetic
TKGEMQIAGKGGGSP

SEQ ID NO: 2204 - protein, 12 aa, synthetic construct
  REGION 1..12: note = Synthetic
TVSADAIALAAQ

SEQ ID NO: 2205 - protein, 9 aa, synthetic construct
  REGION 1..9: note = Synthetic
VVAGHDIHI

SEQ ID NO: 2206 - protein, 24 aa, synthetic construct
  REGION 1..24: note = Synthetic
PSGPNHTKVVQLPKISKNALKANG

SEQ ID NO: 2207 - protein, 41 aa, synthetic construct
  REGION 1..41: note = Synthetic
LVGATPERPRLRLVDADDPLLRTAPGPGEVWVTPVIGSQAR

SEQ ID NO: 2208 - protein, 27 aa, synthetic construct
  REGION 1..27: note = Synthetic
QQSRWGLGSPNCHGPDWASPVCQRHSP

SEQ ID NO: 2209 - protein, 17 aa, synthetic construct
  REGION 1..17: note = Synthetic
AGEAMVLVYYESIAYSF

SEQ ID NO: 2210 - protein, 24 aa, synthetic construct
  REGION 1..24: note = Synthetic
GGVGLASTLWYAESNALSKRLGEL

SEQ ID NO: 2211 - protein, 18 aa, synthetic construct
  REGION 1..18: note = Synthetic
GTLVRIAPVIGACMARQA

SEQ ID NO: 2212 - protein, 18 aa, synthetic construct
  REGION 1..18: note = Synthetic
IRRVTRVYHNGITGETTT

SEQ ID NO: 2213 - protein, 18 aa, synthetic construct
  REGION 1..18: note = Synthetic
IVKTGERQHGIHIQGSDP

SEQ ID NO: 2214 - protein, 24 aa, synthetic construct
  REGION 1..24: note = Synthetic
IVKTGERQHGIHIQGSDPGGVRTA

SEQ ID NO: 2215 - protein, 24 aa, synthetic construct
  REGION 1..24: note = Synthetic
LRDTNVTAVPASGAPAAVSVLGAS

SEQ ID NO: 2216 - protein, 24 aa, synthetic construct
  REGION 1..24: note = Synthetic
PEAPAPQPPAGRELSAAANAAVNT

SEQ ID NO: 2217 - protein, 9 aa, synthetic construct
  REGION 1..9: note = Synthetic
AAADFAHAE

SEQ ID NO: 2218 - protein, 9 aa, synthetic construct
  REGION 1..9: note = Synthetic
AAAEVAGAL

SEQ ID NO: 2219 - protein, 9 aa, synthetic construct
  REGION 1..9: note = Synthetic
AAESTFESY

SEQ ID NO: 2220 - protein, 9 aa, synthetic construct
  REGION 1..9: note = Synthetic
AAGFDPEVQ

SEQ ID NO: 2221 - protein, 9 aa, synthetic construct
  REGION 1..9: note = Synthetic
AALGRGHSL

SEQ ID NO: 2222 - protein, 9 aa, synthetic construct
  REGION 1..9: note = Synthetic
AAMQGAVVH

SEQ ID NO: 2223 - protein, 9 aa, synthetic construct
  REGION 1..9: note = Synthetic
AAPAAHADW

SEQ ID NO: 2224 - protein, 9 aa, synthetic construct
  REGION 1..9: note = Synthetic
AAQATVVQR

SEQ ID NO: 2225 - protein, 9 aa, synthetic construct
  REGION 1..9: note = Synthetic
AARVAGDNY

SEQ ID NO: 2226 - protein, 9 aa, synthetic construct
  REGION 1..9: note = Synthetic
AAVALLNKL

SEQ ID NO: 2227 - protein, 9 aa, synthetic construct
  REGION 1..9: note = Synthetic
ADDPPATVY

SEQ ID NO: 2228 - protein, 9 aa, synthetic construct
  REGION 1..9: note = Synthetic
AEAGRFKVL

SEQ ID NO: 2229 - protein, 9 aa, synthetic construct
  REGION 1..9: note = Synthetic
AEATQLVTA

SEQ ID NO: 2230 - protein, 9 aa, synthetic construct
  REGION 1..9: note = Synthetic
AEGGATLGA

SEQ ID NO: 2231 - protein, 9 aa, synthetic construct
  REGION 1..9: note = Synthetic
AEHGEVSIQ

SEQ ID NO: 2232 - protein, 9 aa, synthetic construct
  REGION 1..9: note = Synthetic
AEIAFYPKE

SEQ ID NO: 2233 - protein, 9 aa, synthetic construct
  REGION 1..9: note = Synthetic
AEKVTTPAV

SEQ ID NO: 2234 - protein, 9 aa, synthetic construct
  REGION 1..9: note = Synthetic
AELQTYLRQ

SEQ ID NO: 2235 - protein, 9 aa, synthetic construct
  REGION 1..9: note = Synthetic
AEQSLIEVG

SEQ ID NO: 2236 - protein, 9 aa, synthetic construct
  REGION 1..9: note = Synthetic
AESNALSKR

SEQ ID NO: 2237 - protein, 9 aa, synthetic construct
  REGION 1..9: note = Synthetic
AESSEAMAA

SEQ ID NO: 2238 - protein, 9 aa, synthetic construct
  REGION 1..9: note = Synthetic
AEVKVGYRA

SEQ ID NO: 2239 - protein, 9 aa, synthetic construct
  REGION 1..9: note = Synthetic
AEVTDTSPS

SEQ ID NO: 2240 - protein, 9 aa, synthetic construct
  REGION 1..9: note = Synthetic
AGKSLKKKN

SEQ ID NO: 2241 - protein, 9 aa, synthetic construct
  REGION 1..9: note = Synthetic
AGLAGPSAV

SEQ ID NO: 2242 - protein, 9 aa, synthetic construct
  REGION 1..9: note = Synthetic
AIRVGRGAR

SEQ ID NO: 2243 - protein, 9 aa, synthetic construct
  REGION 1..9: note = Synthetic
ALAAIASAA

SEQ ID NO: 2244 - protein, 9 aa, synthetic construct
  REGION 1..9: note = Synthetic
ALADVPYVL

SEQ ID NO: 2245 - protein, 9 aa, synthetic construct
  REGION 1..9: note = Synthetic
ALANDGTIV

SEQ ID NO: 2246 - protein, 9 aa, synthetic construct
  REGION 1..9: note = Synthetic
ALGRGHSLY

SEQ ID NO: 2247 - protein, 9 aa, synthetic construct
  REGION 1..9: note = Synthetic
ALILAASPV

SEQ ID NO: 2248 - protein, 9 aa, synthetic construct
  REGION 1..9: note = Synthetic
ALMLACTGL

SEQ ID NO: 2249 - protein, 9 aa, synthetic construct
  REGION 1..9: note = Synthetic
AMQGAVVHL

SEQ ID NO: 2250 - protein, 9 aa, synthetic construct
  REGION 1..9: note = Synthetic
AMTHLSPAL

SEQ ID NO: 2251 - protein, 9 aa, synthetic construct
  REGION 1..9: note = Synthetic
AMYGKHITL

SEQ ID NO: 2252 - protein, 9 aa, synthetic construct
  REGION 1..9: note = Synthetic
ANEANALLW

SEQ ID NO: 2253 - protein, 9 aa, synthetic construct
  REGION 1..9: note = Synthetic
APLSITLQA

SEQ ID NO: 2254 - protein, 9 aa, synthetic construct
  REGION 1..9: note = Synthetic
APNALAWAL

SEQ ID NO: 2255 - protein, 9 aa, synthetic construct
  REGION 1..9: note = Synthetic
APPAPKPAP

SEQ ID NO: 2256 - protein, 9 aa, synthetic construct
  REGION 1..9: note = Synthetic
APPGAGFIY

SEQ ID NO: 2257 - protein, 9 aa, synthetic construct
  REGION 1..9: note = Synthetic
APQAAPLSI

SEQ ID NO: 2258 - protein, 9 aa, synthetic construct
  REGION 1..9: note = Synthetic
APRIENTAK

SEQ ID NO: 2259 - protein, 9 aa, synthetic construct
  REGION 1..9: note = Synthetic
AQGKALLYR

SEQ ID NO: 2260 - protein, 9 aa, synthetic construct
  REGION 1..9: note = Synthetic
AQITSYVGF

SEQ ID NO: 2261 - protein, 9 aa, synthetic construct
  REGION 1..9: note = Synthetic
AQLEVRGQR

SEQ ID NO: 2262 - protein, 9 aa, synthetic construct
  REGION 1..9: note = Synthetic
AQQLKQADR

SEQ ID NO: 2263 - protein, 9 aa, synthetic construct
  REGION 1..9: note = Synthetic
AQVTVAGRY

SEQ ID NO: 2264 - protein, 9 aa, synthetic construct
  REGION 1..9: note = Synthetic
ARRSRVRAL

SEQ ID NO: 2265 - protein, 9 aa, synthetic construct
  REGION 1..9: note = Synthetic
ASPRRARRA

SEQ ID NO: 2266 - protein, 9 aa, synthetic construct
  REGION 1..9: note = Synthetic
ASSPDAHVP

SEQ ID NO: 2267 - protein, 9 aa, synthetic construct
  REGION 1..9: note = Synthetic
ASVSNPGTF

SEQ ID NO: 2268 - protein, 9 aa, synthetic construct
  REGION 1..9: note = Synthetic
ATWNFQSTY

SEQ ID NO: 2269 - protein, 9 aa, synthetic construct
  REGION 1..9: note = Synthetic
ATYIADSGF

SEQ ID NO: 2270 - protein, 9 aa, synthetic construct
  REGION 1..9: note = Synthetic
AVAAPAVGA

SEQ ID NO: 2271 - protein, 9 aa, synthetic construct
  REGION 1..9: note = Synthetic
AVFMQQRPL

SEQ ID NO: 2272 - protein, 9 aa, synthetic construct
  REGION 1..9: note = Synthetic
AVLVNPHIF

SEQ ID NO: 2273 - protein, 9 aa, synthetic construct
  REGION 1..9: note = Synthetic
CFGKDLKRP

SEQ ID NO: 2274 - protein, 9 aa, synthetic construct
  REGION 1..9: note = Synthetic
CPSSLGNGV

SEQ ID NO: 2275 - protein, 9 aa, synthetic construct
  REGION 1..9: note = Synthetic
DAGHEHDTW

SEQ ID NO: 2276 - protein, 9 aa, synthetic construct
  REGION 1..9: note = Synthetic
DAKHDLTVT

SEQ ID NO: 2277 - protein, 9 aa, synthetic construct
  REGION 1..9: note = Synthetic
DASGQHRLW

SEQ ID NO: 2278 - protein, 9 aa, synthetic construct
  REGION 1..9: note = Synthetic
DATFETYAL

SEQ ID NO: 2279 - protein, 9 aa, synthetic construct
  REGION 1..9: note = Synthetic
DATFQTYAL

SEQ ID NO: 2280 - protein, 9 aa, synthetic construct
  REGION 1..9: note = Synthetic
DATLVGAKF

SEQ ID NO: 2281 - protein, 9 aa, synthetic construct
  REGION 1..9: note = Synthetic
DDEVDVSGR

SEQ ID NO: 2282 - protein, 9 aa, synthetic construct
  REGION 1..9: note = Synthetic
DENGKPQTY

SEQ ID NO: 2283 - protein, 9 aa, synthetic construct
  REGION 1..9: note = Synthetic
DGPPSRPTT

SEQ ID NO: 2284 - protein, 9 aa, synthetic construct
  REGION 1..9: note = Synthetic
DHLTGRSCQ

SEQ ID NO: 2285 - protein, 9 aa, synthetic construct
  REGION 1..9: note = Synthetic
DNEGKMESN

SEQ ID NO: 2286 - protein, 9 aa, synthetic construct
  REGION 1..9: note = Synthetic
DPPATVYRY

SEQ ID NO: 2287 - protein, 9 aa, synthetic construct
  REGION 1..9: note = Synthetic
EATEGDATL

SEQ ID NO: 2288 - protein, 9 aa, synthetic construct
  REGION 1..9: note = Synthetic
EATQQAAGF

SEQ ID NO: 2289 - protein, 9 aa, synthetic construct
  REGION 1..9: note = Synthetic
ECSGKQDCP

SEQ ID NO: 2290 - protein, 9 aa, synthetic construct
  REGION 1..9: note = Synthetic
EGGKLRGKD

SEQ ID NO: 2291 - protein, 9 aa, synthetic construct
  REGION 1..9: note = Synthetic
EGKMESNKD

SEQ ID NO: 2292 - protein, 9 aa, synthetic construct
  REGION 1..9: note = Synthetic
EHRMQEAVE

SEQ ID NO: 2293 - protein, 9 aa, synthetic construct
  REGION 1..9: note = Synthetic
EKRLDIDDA

SEQ ID NO: 2294 - protein, 9 aa, synthetic construct
  REGION 1..9: note = Synthetic
EPASANTLL

SEQ ID NO: 2295 - protein, 9 aa, synthetic construct
  REGION 1..9: note = Synthetic
EPQAELAVF

SEQ ID NO: 2296 - protein, 9 aa, synthetic construct
  REGION 1..9: note = Synthetic
EPVKLTLTG

SEQ ID NO: 2297 - protein, 9 aa, synthetic construct
  REGION 1..9: note = Synthetic
ESAEGRKIF

SEQ ID NO: 2298 - protein, 9 aa, synthetic construct
  REGION 1..9: note = Synthetic
ESYSESHNF

SEQ ID NO: 2299 - protein, 9 aa, synthetic construct
  REGION 1..9: note = Synthetic
ETFCITTIY

SEQ ID NO: 2300 - protein, 9 aa, synthetic construct
  REGION 1..9: note = Synthetic
EVAGALELS

SEQ ID NO: 2301 - protein, 9 aa, synthetic construct
  REGION 1..9: note = Synthetic
EVAKVEVVP

SEQ ID NO: 2302 - protein, 9 aa, synthetic construct
  REGION 1..9: note = Synthetic
EVDGIIQEF

SEQ ID NO: 2303 - protein, 9 aa, synthetic construct
  REGION 1..9: note = Synthetic
EVRADNNFY

SEQ ID NO: 2304 - protein, 9 aa, synthetic construct
  REGION 1..9: note = Synthetic
FAILSSTTE

SEQ ID NO: 2305 - protein, 9 aa, synthetic construct
  REGION 1..9: note = Synthetic
FAISAYALK

SEQ ID NO: 2306 - protein, 9 aa, synthetic construct
  REGION 1..9: note = Synthetic
FALYDGTYL

SEQ ID NO: 2307 - protein, 9 aa, synthetic construct
  REGION 1..9: note = Synthetic
FDTMLGFAI

SEQ ID NO: 2308 - protein, 9 aa, synthetic construct
  REGION 1..9: note = Synthetic
FEGKPALEL

SEQ ID NO: 2309 - protein, 9 aa, synthetic construct
  REGION 1..9: note = Synthetic
FELGADHAV

SEQ ID NO: 2310 - protein, 9 aa, synthetic construct
  REGION 1..9: note = Synthetic
FEPGITTNY

SEQ ID NO: 2311 - protein, 9 aa, synthetic construct
  REGION 1..9: note = Synthetic
FETYALTGI

SEQ ID NO: 2312 - protein, 9 aa, synthetic construct
  REGION 1..9: note = Synthetic
FIYRETFCI

SEQ ID NO: 2313 - protein, 9 aa, synthetic construct
  REGION 1..9: note = Synthetic
FPTRTTAPG

SEQ ID NO: 2314 - protein, 9 aa, synthetic construct
  REGION 1..9: note = Synthetic
FQTYALTGI

SEQ ID NO: 2315 - protein, 9 aa, synthetic construct
  REGION 1..9: note = Synthetic
FTHADGWFL

SEQ ID NO: 2316 - protein, 9 aa, synthetic construct
  REGION 1..9: note = Synthetic
FVRDGQSVI

SEQ ID NO: 2317 - protein, 9 aa, synthetic construct
  REGION 1..9: note = Synthetic
FVRSGQPVI

SEQ ID NO: 2318 - protein, 9 aa, synthetic construct
  REGION 1..9: note = Synthetic
FVWYVDTVI

SEQ ID NO: 2319 - protein, 9 aa, synthetic construct
  REGION 1..9: note = Synthetic
GAASSRQAL

SEQ ID NO: 2320 - protein, 9 aa, synthetic construct
  REGION 1..9: note = Synthetic
GAASSYFEY

SEQ ID NO: 2321 - protein, 9 aa, synthetic construct
  REGION 1..9: note = Synthetic
GAFDLKTTF

SEQ ID NO: 2322 - protein, 9 aa, synthetic construct
  REGION 1..9: note = Synthetic
GAPAAVSVL

SEQ ID NO: 2323 - protein, 9 aa, synthetic construct
  REGION 1..9: note = Synthetic
GATRAVDSL

SEQ ID NO: 2324 - protein, 9 aa, synthetic construct
  REGION 1..9: note = Synthetic
GAVPGGAVP

SEQ ID NO: 2325 - protein, 9 aa, synthetic construct
  REGION 1..9: note = Synthetic
GEAMVLVYY

SEQ ID NO: 2326 - protein, 9 aa, synthetic construct
  REGION 1..9: note = Synthetic
GEIALGDAT

SEQ ID NO: 2327 - protein, 9 aa, synthetic construct
  REGION 1..9: note = Synthetic
GELMAAQVA

SEQ ID NO: 2328 - protein, 9 aa, synthetic construct
  REGION 1..9: note = Synthetic
GGVPGGAVP

SEQ ID NO: 2329 - protein, 9 aa, synthetic construct
  REGION 1..9: note = Synthetic
GHEHDTWFD

SEQ ID NO: 2330 - protein, 9 aa, synthetic construct
  REGION 1..9: note = Synthetic
GIGALKAGA

SEQ ID NO: 2331 - protein, 9 aa, synthetic construct
  REGION 1..9: note = Synthetic
GIVIPPKAL

SEQ ID NO: 2332 - protein, 9 aa, synthetic construct
  REGION 1..9: note = Synthetic
GKDLKRPGS

SEQ ID NO: 2333 - protein, 9 aa, synthetic construct
  REGION 1..9: note = Synthetic
GKLPKPVTV

SEQ ID NO: 2334 - protein, 9 aa, synthetic construct
  REGION 1..9: note = Synthetic
GKSLKKKNQ

SEQ ID NO: 2335 - protein, 9 aa, synthetic construct
  REGION 1..9: note = Synthetic
GLDVQQGTV

SEQ ID NO: 2336 - protein, 9 aa, synthetic construct
  REGION 1..9: note = Synthetic
GLTDGVSRI

SEQ ID NO: 2337 - protein, 9 aa, synthetic construct
  REGION 1..9: note = Synthetic
GLYPTYTEW

SEQ ID NO: 2338 - protein, 9 aa, synthetic construct
  REGION 1..9: note = Synthetic
GLYQTYTEW

SEQ ID NO: 2339 - protein, 9 aa, synthetic construct
  REGION 1..9: note = Synthetic
GPPSRPTTP

SEQ ID NO: 2340 - protein, 9 aa, synthetic construct
  REGION 1..9: note = Synthetic
GPSAVAAPA

SEQ ID NO: 2341 - protein, 9 aa, synthetic construct
  REGION 1..9: note = Synthetic
GVAPTAQQL

SEQ ID NO: 2342 - protein, 9 aa, synthetic construct
  REGION 1..9: note = Synthetic
GVGLASTLW

SEQ ID NO: 2343 - protein, 9 aa, synthetic construct
  REGION 1..9: note = Synthetic
GYEAGFSLG

SEQ ID NO: 2344 - protein, 9 aa, synthetic construct
  REGION 1..9: note = Synthetic
HADDGTIVI

SEQ ID NO: 2345 - protein, 9 aa, synthetic construct
  REGION 1..9: note = Synthetic
HADWNNQSI

SEQ ID NO: 2346 - protein, 9 aa, synthetic construct
  REGION 1..9: note = Synthetic
HAEHEKDVR

SEQ ID NO: 2347 - protein, 9 aa, synthetic construct
  REGION 1..9: note = Synthetic
HANHYGTRI

SEQ ID NO: 2348 - protein, 9 aa, synthetic construct
  REGION 1..9: note = Synthetic
HAQGKALLY

SEQ ID NO: 2349 - protein, 9 aa, synthetic construct
  REGION 1..9: note = Synthetic
HFIGYIYEV

SEQ ID NO: 2350 - protein, 9 aa, synthetic construct
  REGION 1..9: note = Synthetic
HLSPALADV

SEQ ID NO: 2351 - protein, 9 aa, synthetic construct
  REGION 1..9: note = Synthetic
HSLYASYEY

SEQ ID NO: 2352 - protein, 9 aa, synthetic construct
  REGION 1..9: note = Synthetic
HVRGMLVPV

SEQ ID NO: 2353 - protein, 9 aa, synthetic construct
  REGION 1..9: note = Synthetic
HVSKEEQYY

SEQ ID NO: 2354 - protein, 9 aa, synthetic construct
  REGION 1..9: note = Synthetic
HVTRGWSIF

SEQ ID NO: 2355 - protein, 9 aa, synthetic construct
  REGION 1..9: note = Synthetic
IADSGFYLD

SEQ ID NO: 2356 - protein, 9 aa, synthetic construct
  REGION 1..9: note = Synthetic
IAHRTELRG

SEQ ID NO: 2357 - protein, 9 aa, synthetic construct
  REGION 1..9: note = Synthetic
IENTAKLSG

SEQ ID NO: 2358 - protein, 9 aa, synthetic construct
  REGION 1..9: note = Synthetic
IESKISQSV

SEQ ID NO: 2359 - protein, 9 aa, synthetic construct
  REGION 1..9: note = Synthetic
IETGGARRF

SEQ ID NO: 2360 - protein, 9 aa, synthetic construct
  REGION 1..9: note = Synthetic
IIKDAPPGA

SEQ ID NO: 2361 - protein, 9 aa, synthetic construct
  REGION 1..9: note = Synthetic
IIQEFAADL

SEQ ID NO: 2362 - protein, 9 aa, synthetic construct
  REGION 1..9: note = Synthetic
ILAGALATY

SEQ ID NO: 2363 - protein, 9 aa, synthetic construct
  REGION 1..9: note = Synthetic
ILLENPAAE

SEQ ID NO: 2364 - protein, 9 aa, synthetic construct
  REGION 1..9: note = Synthetic
ILPILVLAL

SEQ ID NO: 2365 - protein, 9 aa, synthetic construct
  REGION 1..9: note = Synthetic
IPFQRALRL

SEQ ID NO: 2366 - protein, 9 aa, synthetic construct
  REGION 1..9: note = Synthetic
ISVRVHVSK

SEQ ID NO: 2367 - protein, 9 aa, synthetic construct
  REGION 1..9: note = Synthetic
ITNETGKTY

SEQ ID NO: 2368 - protein, 9 aa, synthetic construct
  REGION 1..9: note = Synthetic
ITNKRAALI

SEQ ID NO: 2369 - protein, 9 aa, synthetic construct
  REGION 1..9: note = Synthetic
ITSYVGFSV

SEQ ID NO: 2370 - protein, 9 aa, synthetic construct
  REGION 1..9: note = Synthetic
ITVTSRGGF

SEQ ID NO: 2371 - protein, 9 aa, synthetic construct
  REGION 1..9: note = Synthetic
IVIPPKALF

SEQ ID NO: 2372 - protein, 9 aa, synthetic construct
  REGION 1..9: note = Synthetic
IVVEAGELV

SEQ ID NO: 2373 - protein, 9 aa, synthetic construct
  REGION 1..9: note = Synthetic
KAAKSVNLM

SEQ ID NO: 2374 - protein, 9 aa, synthetic construct
  REGION 1..9: note = Synthetic
KAAPLRRTT

SEQ ID NO: 2375 - protein, 9 aa, synthetic construct
  REGION 1..9: note = Synthetic
KAGKLSATG

SEQ ID NO: 2376 - protein, 9 aa, synthetic construct
  REGION 1..9: note = Synthetic
KAGTIAAPW

SEQ ID NO: 2377 - protein, 9 aa, synthetic construct
  REGION 1..9: note = Synthetic
KAKSLTTEI

SEQ ID NO: 2378 - protein, 9 aa, synthetic construct
  REGION 1..9: note = Synthetic
KATVTTVQV

SEQ ID NO: 2379 - protein, 9 aa, synthetic construct
  REGION 1..9: note = Synthetic
KDYRDKDGG

SEQ ID NO: 2380 - protein, 9 aa, synthetic construct
  REGION 1..9: note = Synthetic
KEAATIVAA

SEQ ID NO: 2381 - protein, 9 aa, synthetic construct
  REGION 1..9: note = Synthetic
KEDVDAAQI

SEQ ID NO: 2382 - protein, 9 aa, synthetic construct
  REGION 1..9: note = Synthetic
KEVDGIIQE

SEQ ID NO: 2383 - protein, 9 aa, synthetic construct
  REGION 1..9: note = Synthetic
KGPKLAMPW

SEQ ID NO: 2384 - protein, 9 aa, synthetic construct
  REGION 1..9: note = Synthetic
KLASGGGAV

SEQ ID NO: 2385 - protein, 9 aa, synthetic construct
  REGION 1..9: note = Synthetic
KLKGKNQEF

SEQ ID NO: 2386 - protein, 9 aa, synthetic construct
  REGION 1..9: note = Synthetic
KLLHHILPI

SEQ ID NO: 2387 - protein, 9 aa, synthetic construct
  REGION 1..9: note = Synthetic
KPAPQPGPQ

SEQ ID NO: 2388 - protein, 9 aa, synthetic construct
  REGION 1..9: note = Synthetic
KPAPTAPPM

SEQ ID NO: 2389 - protein, 9 aa, synthetic construct
  REGION 1..9: note = Synthetic
KPAVSVKVA

SEQ ID NO: 2390 - protein, 9 aa, synthetic construct
  REGION 1..9: note = Synthetic
KPDRAARVA

SEQ ID NO: 2391 - protein, 9 aa, synthetic construct
  REGION 1..9: note = Synthetic
KPLADIAVI

SEQ ID NO: 2392 - protein, 9 aa, synthetic construct
  REGION 1..9: note = Synthetic
KPLADIAVV

SEQ ID NO: 2393 - protein, 9 aa, synthetic construct
  REGION 1..9: note = Synthetic
KPLPKPLPV

SEQ ID NO: 2394 - protein, 9 aa, synthetic construct
  REGION 1..9: note = Synthetic
KQADRDFVW

SEQ ID NO: 2395 - protein, 9 aa, synthetic construct
  REGION 1..9: note = Synthetic
KSLPGGKLP

SEQ ID NO: 2396 - protein, 9 aa, synthetic construct
  REGION 1..9: note = Synthetic
KSYTLRYLA

SEQ ID NO: 2397 - protein, 9 aa, synthetic construct
  REGION 1..9: note = Synthetic
KTNMVVTSV

SEQ ID NO: 2398 - protein, 9 aa, synthetic construct
  REGION 1..9: note = Synthetic
KVLAPRLYL

SEQ ID NO: 2399 - protein, 9 aa, synthetic construct
  REGION 1..9: note = Synthetic
KVLSTKTTL

SEQ ID NO: 2400 - protein, 9 aa, synthetic construct
  REGION 1..9: note = Synthetic
LAAGAGLTL

SEQ ID NO: 2401 - protein, 9 aa, synthetic construct
  REGION 1..9: note = Synthetic
LAAIASAAH

SEQ ID NO: 2402 - protein, 9 aa, synthetic construct
  REGION 1..9: note = Synthetic
LAANGNGQW

SEQ ID NO: 2403 - protein, 9 aa, synthetic construct
  REGION 1..9: note = Synthetic
LAAQVTQRG

SEQ ID NO: 2404 - protein, 9 aa, synthetic construct
  REGION 1..9: note = Synthetic
LAARGDGAL

SEQ ID NO: 2405 - protein, 9 aa, synthetic construct
  REGION 1..9: note = Synthetic
LAAVLVNPH

SEQ ID NO: 2406 - protein, 9 aa, synthetic construct
  REGION 1..9: note = Synthetic
LAGSGLFRM

SEQ ID NO: 2407 - protein, 9 aa, synthetic construct
  REGION 1..9: note = Synthetic
LAKALSAAL

SEQ ID NO: 2408 - protein, 9 aa, synthetic construct
  REGION 1..9: note = Synthetic
LALQAGDAL

SEQ ID NO: 2409 - protein, 9 aa, synthetic construct
  REGION 1..9: note = Synthetic
LAMPWTFHA

SEQ ID NO: 2410 - protein, 9 aa, synthetic construct
  REGION 1..9: note = Synthetic
LANDGTIVI

SEQ ID NO: 2411 - protein, 9 aa, synthetic construct
  REGION 1..9: note = Synthetic
LAPTVGVAF

SEQ ID NO: 2412 - protein, 9 aa, synthetic construct
  REGION 1..9: note = Synthetic
LASDGSVDF

SEQ ID NO: 2413 - protein, 9 aa, synthetic construct
  REGION 1..9: note = Synthetic
LATYQSEYL

SEQ ID NO: 2414 - protein, 9 aa, synthetic construct
  REGION 1..9: note = Synthetic
LAWALMLAC

SEQ ID NO: 2415 - protein, 9 aa, synthetic construct
  REGION 1..9: note = Synthetic
LEAGRRFTH

SEQ ID NO: 2416 - protein, 9 aa, synthetic construct
  REGION 1..9: note = Synthetic
LFTQQGGAY

SEQ ID NO: 2417 - protein, 9 aa, synthetic construct
  REGION 1..9: note = Synthetic
LKRPGSSPM

SEQ ID NO: 2418 - protein, 9 aa, synthetic construct
  REGION 1..9: note = Synthetic
LLGSHVARA

SEQ ID NO: 2419 - protein, 9 aa, synthetic construct
  REGION 1..9: note = Synthetic
LLHHILPIL

SEQ ID NO: 2420 - protein, 9 aa, synthetic construct
  REGION 1..9: note = Synthetic
LLNAGGTLL

SEQ ID NO: 2421 - protein, 9 aa, synthetic construct
  REGION 1..9: note = Synthetic
LMGPLQVNA

SEQ ID NO: 2422 - protein, 9 aa, synthetic construct
  REGION 1..9: note = Synthetic
LNDSKITMG

SEQ ID NO: 2423 - protein, 9 aa, synthetic construct
  REGION 1..9: note = Synthetic
LPEPVKLTL

SEQ ID NO: 2424 - protein, 9 aa, synthetic construct
  REGION 1..9: note = Synthetic
LPILVLALL

SEQ ID NO: 2425 - protein, 9 aa, synthetic construct
  REGION 1..9: note = Synthetic
LPKISKNAL

SEQ ID NO: 2426 - protein, 9 aa, synthetic construct
  REGION 1..9: note = Synthetic
LPKPVTVKL

SEQ ID NO: 2427 - protein, 9 aa, synthetic construct
  REGION 1..9: note = Synthetic
LPLKANPMH

SEQ ID NO: 2428 - protein, 9 aa, synthetic construct
  REGION 1..9: note = Synthetic
LPPRPVVAE

SEQ ID NO: 2429 - protein, 9 aa, synthetic construct
  REGION 1..9: note = Synthetic
LPSIPGTSI

SEQ ID NO: 2430 - protein, 9 aa, synthetic construct
  REGION 1..9: note = Synthetic
LPTHLYKNF

SEQ ID NO: 2431 - protein, 9 aa, synthetic construct
  REGION 1..9: note = Synthetic
LPVRGVALV

SEQ ID NO: 2432 - protein, 9 aa, synthetic construct
  REGION 1..9: note = Synthetic
LPVSLTALD

SEQ ID NO: 2433 - protein, 9 aa, synthetic construct
  REGION 1..9: note = Synthetic
LQGGNKVPV

SEQ ID NO: 2434 - protein, 9 aa, synthetic construct
  REGION 1..9: note = Synthetic
LSAALGADW

SEQ ID NO: 2435 - protein, 9 aa, synthetic construct
  REGION 1..9: note = Synthetic
LSDAGHEHD

SEQ ID NO: 2436 - protein, 9 aa, synthetic construct
  REGION 1..9: note = Synthetic
LSGEVQRKG

SEQ ID NO: 2437 - protein, 9 aa, synthetic construct
  REGION 1..9: note = Synthetic
LSSPSAITV

SEQ ID NO: 2438 - protein, 9 aa, synthetic construct
  REGION 1..9: note = Synthetic
LTWLAILAV

SEQ ID NO: 2439 - protein, 9 aa, synthetic construct
  REGION 1..9: note = Synthetic
LVFSHVRGM

SEQ ID NO: 2440 - protein, 9 aa, synthetic construct
  REGION 1..9: note = Synthetic
LVSDAGADL

SEQ ID NO: 2441 - protein, 9 aa, synthetic construct
  REGION 1..9: note = Synthetic
LVYYESIAY

SEQ ID NO: 2442 - protein, 9 aa, synthetic construct
  REGION 1..9: note = Synthetic
MAAESTFES

SEQ ID NO: 2443 - protein, 9 aa, synthetic construct
  REGION 1..9: note = Synthetic
MAAGHDATL

SEQ ID NO: 2444 - protein, 9 aa, synthetic construct
  REGION 1..9: note = Synthetic
MAAWSERAG

SEQ ID NO: 2445 - protein, 9 aa, synthetic construct
  REGION 1..9: note = Synthetic
MALGALGAA

SEQ ID NO: 2446 - protein, 9 aa, synthetic construct
  REGION 1..9: note = Synthetic
MAPVMGACM

SEQ ID NO: 2447 - protein, 9 aa, synthetic construct
  REGION 1..9: note = Synthetic
MATKGEMQI

SEQ ID NO: 2448 - protein, 9 aa, synthetic construct
  REGION 1..9: note = Synthetic
MDAKGGTLL

SEQ ID NO: 2449 - protein, 9 aa, synthetic construct
  REGION 1..9: note = Synthetic
MESNKDIVI

SEQ ID NO: 2450 - protein, 9 aa, synthetic construct
  REGION 1..9: note = Synthetic
MEVMLRAVF

SEQ ID NO: 2451 - protein, 9 aa, synthetic construct
  REGION 1..9: note = Synthetic
MEYFKTPLP

SEQ ID NO: 2452 - protein, 9 aa, synthetic construct
  REGION 1..9: note = Synthetic
MHTIASILL

SEQ ID NO: 2453 - protein, 9 aa, synthetic construct
  REGION 1..9: note = Synthetic
MIYMSGLAV

SEQ ID NO: 2454 - protein, 9 aa, synthetic construct
  REGION 1..9: note = Synthetic
MLACTGLPL

SEQ ID NO: 2455 - protein, 9 aa, synthetic construct
  REGION 1..9: note = Synthetic
MPIDRKTLC

SEQ ID NO: 2456 - protein, 9 aa, synthetic construct
  REGION 1..9: note = Synthetic
MPKAPELDL

SEQ ID NO: 2457 - protein, 9 aa, synthetic construct
  REGION 1..9: note = Synthetic
MQRQAGLPL

SEQ ID NO: 2458 - protein, 9 aa, synthetic construct
  REGION 1..9: note = Synthetic
NALAWALML

SEQ ID NO: 2459 - protein, 9 aa, synthetic construct
  REGION 1..9: note = Synthetic
NITNKRAAL

SEQ ID NO: 2460 - protein, 9 aa, synthetic construct
  REGION 1..9: note = Synthetic
NLMAAESTF

SEQ ID NO: 2461 - protein, 9 aa, synthetic construct
  REGION 1..9: note = Synthetic
NNETMSGRQ

SEQ ID NO: 2462 - protein, 9 aa, synthetic construct
  REGION 1..9: note = Synthetic
NPGSLIAEV

SEQ ID NO: 2463 - protein, 9 aa, synthetic construct
  REGION 1..9: note = Synthetic
NPMHTIASI

SEQ ID NO: 2464 - protein, 9 aa, synthetic construct
  REGION 1..9: note = Synthetic
NPQTQLSNI

SEQ ID NO: 2465 - protein, 9 aa, synthetic construct
  REGION 1..9: note = Synthetic
NPYTSRRSV

SEQ ID NO: 2466 - protein, 9 aa, synthetic construct
  REGION 1..9: note = Synthetic
PAPTAPPMP

SEQ ID NO: 2467 - protein, 9 aa, synthetic construct
  REGION 1..9: note = Synthetic
PASANTLLL

SEQ ID NO: 2468 - protein, 9 aa, synthetic construct
  REGION 1..9: note = Synthetic
PAVALPRPL

SEQ ID NO: 2469 - protein, 9 aa, synthetic construct
  REGION 1..9: note = Synthetic
PDAHVPFCF

SEQ ID NO: 2470 - protein, 9 aa, synthetic construct
  REGION 1..9: note = Synthetic
PELGAAIRV

SEQ ID NO: 2471 - protein, 9 aa, synthetic construct
  REGION 1..9: note = Synthetic
PFIIKLKDC

SEQ ID NO: 2472 - protein, 9 aa, synthetic construct
  REGION 1..9: note = Synthetic
PGPQPPQPP

SEQ ID NO: 2473 - protein, 9 aa, synthetic construct
  REGION 1..9: note = Synthetic
PGPQPPQPQ

SEQ ID NO: 2474 - protein, 9 aa, synthetic construct
  REGION 1..9: note = Synthetic
PGPTTDYST

SEQ ID NO: 2475 - protein, 9 aa, synthetic construct
  REGION 1..9: note = Synthetic
PGTFTAGKD

SEQ ID NO: 2476 - protein, 9 aa, synthetic construct
  REGION 1..9: note = Synthetic
PGTPGDLLE

SEQ ID NO: 2477 - protein, 9 aa, synthetic construct
  REGION 1..9: note = Synthetic
PKPKPKAER

SEQ ID NO: 2478 - protein, 9 aa, synthetic construct
  REGION 1..9: note = Synthetic
PKPKPKPKA

SEQ ID NO: 2479 - protein, 9 aa, synthetic construct
  REGION 1..9: note = Synthetic
PKPKPKPKP

SEQ ID NO: 2480 - protein, 9 aa, synthetic construct
  REGION 1..9: note = Synthetic
PLPPRPVVA

SEQ ID NO: 2481 - protein, 9 aa, synthetic construct
  REGION 1..9: note = Synthetic
PPAPKPAPQ

SEQ ID NO: 2482 - protein, 9 aa, synthetic construct
  REGION 1..9: note = Synthetic
PPKPAPVAK

SEQ ID NO: 2483 - protein, 9 aa, synthetic construct
  REGION 1..9: note = Synthetic
PPRPVAAQV

SEQ ID NO: 2484 - protein, 9 aa, synthetic construct
  REGION 1..9: note = Synthetic
PPRPVVAEK

SEQ ID NO: 2485 - protein, 9 aa, synthetic construct
  REGION 1..9: note = Synthetic
PPSRPTTPP

SEQ ID NO: 2486 - protein, 9 aa, synthetic construct
  REGION 1..9: note = Synthetic
PRRARRALR

SEQ ID NO: 2487 - protein, 9 aa, synthetic construct
  REGION 1..9: note = Synthetic
QAAPLSITL

SEQ ID NO: 2488 - protein, 9 aa, synthetic construct
  REGION 1..9: note = Synthetic
QADRDFVWY

SEQ ID NO: 2489 - protein, 9 aa, synthetic construct
  REGION 1..9: note = Synthetic
QAIVVGKDL

SEQ ID NO: 2490 - protein, 9 aa, synthetic construct
  REGION 1..9: note = Synthetic
QALGALKLY

SEQ ID NO: 2491 - protein, 9 aa, synthetic construct
  REGION 1..9: note = Synthetic
QELALKLKG

SEQ ID NO: 2492 - protein, 9 aa, synthetic construct
  REGION 1..9: note = Synthetic
QITQHGGPY

SEQ ID NO: 2493 - protein, 9 aa, synthetic construct
  REGION 1..9: note = Synthetic
QITQHGSPY

SEQ ID NO: 2494 - protein, 9 aa, synthetic construct
  REGION 1..9: note = Synthetic
QPLPPRPVA

SEQ ID NO: 2495 - protein, 9 aa, synthetic construct
  REGION 1..9: note = Synthetic
QPPAGRELS

SEQ ID NO: 2496 - protein, 9 aa, synthetic construct
  REGION 1..9: note = Synthetic
QQLKQADRD

SEQ ID NO: 2497 - protein, 9 aa, synthetic construct
  REGION 1..9: note = Synthetic
QQVQVLQRQ

SEQ ID NO: 2498 - protein, 9 aa, synthetic construct
  REGION 1..9: note = Synthetic
QSIVEAPEL

SEQ ID NO: 2499 - protein, 9 aa, synthetic construct
  REGION 1..9: note = Synthetic
QVGSSNSAF

SEQ ID NO: 2500 - protein, 9 aa, synthetic construct
  REGION 1..9: note = Synthetic
RAGLSPATW

SEQ ID NO: 2501 - protein, 9 aa, synthetic construct
  REGION 1..9: note = Synthetic
RARRALRQD

SEQ ID NO: 2502 - protein, 9 aa, synthetic construct
  REGION 1..9: note = Synthetic
RASASRARI

SEQ ID NO: 2503 - protein, 9 aa, synthetic construct
  REGION 1..9: note = Synthetic
RELSAAANA

SEQ ID NO: 2504 - protein, 9 aa, synthetic construct
  REGION 1..9: note = Synthetic
RETFCITTI

SEQ ID NO: 2505 - protein, 9 aa, synthetic construct
  REGION 1..9: note = Synthetic
RGFAQRQQL

SEQ ID NO: 2506 - protein, 9 aa, synthetic construct
  REGION 1..9: note = Synthetic
RGSAATFTL

SEQ ID NO: 2507 - protein, 9 aa, synthetic construct
  REGION 1..9: note = Synthetic
RGWSIFALY

SEQ ID NO: 2508 - protein, 9 aa, synthetic construct
  REGION 1..9: note = Synthetic
RKMLYLIYV

SEQ ID NO: 2509 - protein, 9 aa, synthetic construct
  REGION 1..9: note = Synthetic
RLRKMLYLI

SEQ ID NO: 2510 - protein, 9 aa, synthetic construct
  REGION 1..9: note = Synthetic
RPQITDAVT

SEQ ID NO: 2511 - protein, 9 aa, synthetic construct
  REGION 1..9: note = Synthetic
RPSVNGGRI

SEQ ID NO: 2512 - protein, 9 aa, synthetic construct
  REGION 1..9: note = Synthetic
RRFTHADGW

SEQ ID NO: 2513 - protein, 9 aa, synthetic construct
  REGION 1..9: note = Synthetic
RSGARATSL

SEQ ID NO: 2514 - protein, 9 aa, synthetic construct
  REGION 1..9: note = Synthetic
RSRVRALAW

SEQ ID NO: 2515 - protein, 9 aa, synthetic construct
  REGION 1..9: note = Synthetic
RSRVRALSW

SEQ ID NO: 2516 - protein, 9 aa, synthetic construct
  REGION 1..9: note = Synthetic
RTHGVGASL

SEQ ID NO: 2517 - protein, 9 aa, synthetic construct
  REGION 1..9: note = Synthetic
RTRGQARSG

SEQ ID NO: 2518 - protein, 9 aa, synthetic construct
  REGION 1..9: note = Synthetic
RVAPPAVAL

SEQ ID NO: 2519 - protein, 9 aa, synthetic construct
  REGION 1..9: note = Synthetic
RVLPEPVKL

SEQ ID NO: 2520 - protein, 9 aa, synthetic construct
  REGION 1..9: note = Synthetic
RVRALAWLL

SEQ ID NO: 2521 - protein, 9 aa, synthetic construct
  REGION 1..9: note = Synthetic
RVRALSWLL

SEQ ID NO: 2522 - protein, 9 aa, synthetic construct
  REGION 1..9: note = Synthetic
RVTVSGGSL

SEQ ID NO: 2523 - protein, 9 aa, synthetic construct
  REGION 1..9: note = Synthetic
SEAMAAWSE

SEQ ID NO: 2524 - protein, 9 aa, synthetic construct
  REGION 1..9: note = Synthetic
SESHNFHAS

SEQ ID NO: 2525 - protein, 9 aa, synthetic construct
  REGION 1..9: note = Synthetic
SGEGRVNIG

SEQ ID NO: 2526 - protein, 9 aa, synthetic construct
  REGION 1..9: note = Synthetic
SGLAVRVHV

SEQ ID NO: 2527 - protein, 9 aa, synthetic construct
  REGION 1..9: note = Synthetic
SLADISLGA

SEQ ID NO: 2528 - protein, 9 aa, synthetic construct
  REGION 1..9: note = Synthetic
SLFAILSST

SEQ ID NO: 2529 - protein, 9 aa, synthetic construct
  REGION 1..9: note = Synthetic
SLFAPHGNV

SEQ ID NO: 2530 - protein, 9 aa, synthetic construct
  REGION 1..9: note = Synthetic
SLSIDNATW

SEQ ID NO: 2531 - protein, 9 aa, synthetic construct
  REGION 1..9: note = Synthetic
SPMEVMLRA

SEQ ID NO: 2532 - protein, 9 aa, synthetic construct
  REGION 1..9: note = Synthetic
SPQPIRATV

SEQ ID NO: 2533 - protein, 9 aa, synthetic construct
  REGION 1..9: note = Synthetic
SPRRARRAL

SEQ ID NO: 2534 - protein, 9 aa, synthetic construct
  REGION 1..9: note = Synthetic
SPSRLAGTL

SEQ ID NO: 2535 - protein, 9 aa, synthetic construct
  REGION 1..9: note = Synthetic
SSTPLGSLF

SEQ ID NO: 2536 - protein, 9 aa, synthetic construct
  REGION 1..9: note = Synthetic
STYELLDYL

SEQ ID NO: 2537 - protein, 9 aa, synthetic construct
  REGION 1..9: note = Synthetic
SVAMKPYEV

SEQ ID NO: 2538 - protein, 9 aa, synthetic construct
  REGION 1..9: note = Synthetic
SVAPNALAW

SEQ ID NO: 2539 - protein, 9 aa, synthetic construct
  REGION 1..9: note = Synthetic
SVKVAKKLF

SEQ ID NO: 2540 - protein, 9 aa, synthetic construct
  REGION 1..9: note = Synthetic
TAFMSGRSL

SEQ ID NO: 2541 - protein, 9 aa, synthetic construct
  REGION 1..9: note = Synthetic
TAGATPFDI

SEQ ID NO: 2542 - protein, 9 aa, synthetic construct
  REGION 1..9: note = Synthetic
TAPVTSPAW

SEQ ID NO: 2543 - protein, 9 aa, synthetic construct
  REGION 1..9: note = Synthetic
TARTGWLTW

SEQ ID NO: 2544 - protein, 9 aa, synthetic construct
  REGION 1..9: note = Synthetic
TEAQGVQVR

SEQ ID NO: 2545 - protein, 9 aa, synthetic construct
  REGION 1..9: note = Synthetic
TEVYLEHRM

SEQ ID NO: 2546 - protein, 9 aa, synthetic construct
  REGION 1..9: note = Synthetic
TFEGKPALE

SEQ ID NO: 2547 - protein, 9 aa, synthetic construct
  REGION 1..9: note = Synthetic
TFTGKVTNG

SEQ ID NO: 2548 - protein, 9 aa, synthetic construct
  REGION 1..9: note = Synthetic
TGDGGGHTD

SEQ ID NO: 2549 - protein, 9 aa, synthetic construct
  REGION 1..9: note = Synthetic
TLAKALSAA

SEQ ID NO: 2550 - protein, 9 aa, synthetic construct
  REGION 1..9: note = Synthetic
TLANVGDTW

SEQ ID NO: 2551 - protein, 9 aa, synthetic construct
  REGION 1..9: note = Synthetic
TLNASNLTL

SEQ ID NO: 2552 - protein, 9 aa, synthetic construct
  REGION 1..9: note = Synthetic
TLSSAHGNV

SEQ ID NO: 2553 - protein, 9 aa, synthetic construct
  REGION 1..9: note = Synthetic
TPFDIKLKE

SEQ ID NO: 2554 - protein, 9 aa, synthetic construct
  REGION 1..9: note = Synthetic
TPFIIKLKD

SEQ ID NO: 2555 - protein, 9 aa, synthetic construct
  REGION 1..9: note = Synthetic
TPGWSIYGL

SEQ ID NO: 2556 - protein, 9 aa, synthetic construct
  REGION 1..9: note = Synthetic
TPLGSAATF

SEQ ID NO: 2557 - protein, 9 aa, synthetic construct
  REGION 1..9: note = Synthetic
TPLGSLFAI

SEQ ID NO: 2558 - protein, 9 aa, synthetic construct
  REGION 1..9: note = Synthetic
TPLPVSLTA

SEQ ID NO: 2559 - protein, 9 aa, synthetic construct
  REGION 1..9: note = Synthetic
TRQGIMDQY

SEQ ID NO: 2560 - protein, 9 aa, synthetic construct
  REGION 1..9: note = Synthetic
TSKQDERNY

SEQ ID NO: 2561 - protein, 9 aa, synthetic construct
  REGION 1..9: note = Synthetic
TSPYDGKYW

SEQ ID NO: 2562 - protein, 9 aa, synthetic construct
  REGION 1..9: note = Synthetic
TSRRSVASI

SEQ ID NO: 2563 - protein, 9 aa, synthetic construct
  REGION 1..9: note = Synthetic
TSRTVTMRY

SEQ ID NO: 2564 - protein, 9 aa, synthetic construct
  REGION 1..9: note = Synthetic
TTEYPNARY

SEQ ID NO: 2565 - protein, 9 aa, synthetic construct
  REGION 1..9: note = Synthetic
TTEYSNARY

SEQ ID NO: 2566 - protein, 9 aa, synthetic construct
  REGION 1..9: note = Synthetic
TTLGLEQTF

SEQ ID NO: 2567 - protein, 9 aa, synthetic construct
  REGION 1..9: note = Synthetic
TVLAAGAGL

SEQ ID NO: 2568 - protein, 9 aa, synthetic construct
  REGION 1..9: note = Synthetic
TVQELALKL

SEQ ID NO: 2569 - protein, 9 aa, synthetic construct
  REGION 1..9: note = Synthetic
TVVQRNKHW

SEQ ID NO: 2570 - protein, 9 aa, synthetic construct
  REGION 1..9: note = Synthetic
VAAAADLAL

SEQ ID NO: 2571 - protein, 9 aa, synthetic construct
  REGION 1..9: note = Synthetic
VALASQARW

SEQ ID NO: 2572 - protein, 9 aa, synthetic construct
  REGION 1..9: note = Synthetic
VAMKPYEVT

SEQ ID NO: 2573 - protein, 9 aa, synthetic construct
  REGION 1..9: note = Synthetic
VARLVKLQG

SEQ ID NO: 2574 - protein, 9 aa, synthetic construct
  REGION 1..9: note = Synthetic
VAVAGGRWH

SEQ ID NO: 2575 - protein, 9 aa, synthetic construct
  REGION 1..9: note = Synthetic
VEASAITTY

SEQ ID NO: 2576 - protein, 9 aa, synthetic construct
  REGION 1..9: note = Synthetic
VEDIGGKNY

SEQ ID NO: 2577 - protein, 9 aa, synthetic construct
  REGION 1..9: note = Synthetic
VEVSSPPPV

SEQ ID NO: 2578 - protein, 9 aa, synthetic construct
  REGION 1..9: note = Synthetic
VGAGGYEAG

SEQ ID NO: 2579 - protein, 9 aa, synthetic construct
  REGION 1..9: note = Synthetic
VGGGEHGRW

SEQ ID NO: 2580 - protein, 9 aa, synthetic construct
  REGION 1..9: note = Synthetic
VHVSKEEQY

SEQ ID NO: 2581 - protein, 9 aa, synthetic construct
  REGION 1..9: note = Synthetic
VIDGQKVLA

SEQ ID NO: 2582 - protein, 9 aa, synthetic construct
  REGION 1..9: note = Synthetic
VIGACTSPY

SEQ ID NO: 2583 - protein, 9 aa, synthetic construct
  REGION 1..9: note = Synthetic
VKLGGVYEA

SEQ ID NO: 2584 - protein, 9 aa, synthetic construct
  REGION 1..9: note = Synthetic
VLAPRLYLT

SEQ ID NO: 2585 - protein, 9 aa, synthetic construct
  REGION 1..9: note = Synthetic
VLVKTNMVV

SEQ ID NO: 2586 - protein, 9 aa, synthetic construct
  REGION 1..9: note = Synthetic
VPASGAPAA

SEQ ID NO: 2587 - protein, 9 aa, synthetic construct
  REGION 1..9: note = Synthetic
VPFCFGKDL

SEQ ID NO: 2588 - protein, 9 aa, synthetic construct
  REGION 1..9: note = Synthetic
VPVSEHCTV

SEQ ID NO: 2589 - protein, 9 aa, synthetic construct
  REGION 1..9: note = Synthetic
VPVTPPKVE

SEQ ID NO: 2590 - protein, 9 aa, synthetic construct
  REGION 1..9: note = Synthetic
VRTVSAMEY

SEQ ID NO: 2591 - protein, 9 aa, synthetic construct
  REGION 1..9: note = Synthetic
VSGGSLSAP

SEQ ID NO: 2592 - protein, 9 aa, synthetic construct
  REGION 1..9: note = Synthetic
VSSATKAKG

SEQ ID NO: 2593 - protein, 9 aa, synthetic construct
  REGION 1..9: note = Synthetic
VSSPPPVSV

SEQ ID NO: 2594 - protein, 9 aa, synthetic construct
  REGION 1..9: note = Synthetic
VSVKVAKKL

SEQ ID NO: 2595 - protein, 9 aa, synthetic construct
  REGION 1..9: note = Synthetic
VTMRYLASY

SEQ ID NO: 2596 - protein, 9 aa, synthetic construct
  REGION 1..9: note = Synthetic
VTSVAMKPY

SEQ ID NO: 2597 - protein, 9 aa, synthetic construct
  REGION 1..9: note = Synthetic
VVAEKVTTP

SEQ ID NO: 2598 - protein, 9 aa, synthetic construct
  REGION 1..9: note = Synthetic
VVDGPPSRP

SEQ ID NO: 2599 - protein, 9 aa, synthetic construct
  REGION 1..9: note = Synthetic
VVETAQPLP

SEQ ID NO: 2600 - protein, 9 aa, synthetic construct
  REGION 1..9: note = Synthetic
WLTWLAILA

SEQ ID NO: 2601 - protein, 9 aa, synthetic construct
  REGION 1..9: note = Synthetic
WTFHAGYRY

SEQ ID NO: 2602 - protein, 9 aa, synthetic construct
  REGION 1..9: note = Synthetic
WVMTDNSNV

SEQ ID NO: 2603 - protein, 9 aa, synthetic construct
  REGION 1..9: note = Synthetic
YAEHGEVSI

SEQ ID NO: 2604 - protein, 9 aa, synthetic construct
  REGION 1..9: note = Synthetic
YAIDGTAAG

SEQ ID NO: 2605 - protein, 9 aa, synthetic construct
  REGION 1..9: note = Synthetic
YALKSRIAL

SEQ ID NO: 2606 - protein, 9 aa, synthetic construct
  REGION 1..9: note = Synthetic
YATNPQTQL

SEQ ID NO: 2607 - protein, 9 aa, synthetic construct
  REGION 1..9: note = Synthetic
YDTGDLIAY

SEQ ID NO: 2608 - protein, 9 aa, synthetic construct
  REGION 1..9: note = Synthetic
YEAGFSLGS

SEQ ID NO: 2609 - protein, 9 aa, synthetic construct
  REGION 1..9: note = Synthetic
YEDATFETY

SEQ ID NO: 2610 - protein, 9 aa, synthetic construct
  REGION 1..9: note = Synthetic
YENKSSTPL

SEQ ID NO: 2611 - protein, 9 aa, synthetic construct
  REGION 1..9: note = Synthetic
YEVTPTRML

SEQ ID NO: 2612 - protein, 9 aa, synthetic construct
  REGION 1..9: note = Synthetic
YEYIWGLYP

SEQ ID NO: 2613 - protein, 9 aa, synthetic construct
  REGION 1..9: note = Synthetic
YEYIWGLYQ

SEQ ID NO: 2614 - protein, 9 aa, synthetic construct
  REGION 1..9: note = Synthetic
YEYSKGPKL

SEQ ID NO: 2615 - protein, 9 aa, synthetic construct
  REGION 1..9: note = Synthetic
YFEPGPTTD

SEQ ID NO: 2616 - protein, 9 aa, synthetic construct
  REGION 1..9: note = Synthetic
YIWGLYPTY

SEQ ID NO: 2617 - protein, 9 aa, synthetic construct
  REGION 1..9: note = Synthetic
YIWGLYQTY

SEQ ID NO: 2618 - protein, 9 aa, synthetic construct
  REGION 1..9: note = Synthetic
YLRQITPGW

SEQ ID NO: 2619 - protein, 9 aa, synthetic construct
  REGION 1..9: note = Synthetic
YMIYMSGLA

SEQ ID NO: 2620 - protein, 9 aa, synthetic construct
  REGION 1..9: note = Synthetic
YPALRAALI

SEQ ID NO: 2621 - protein, 9 aa, synthetic construct
  REGION 1..9: note = Synthetic
YPGTPGDLL

SEQ ID NO: 2622 - protein, 9 aa, synthetic construct
  REGION 1..9: note = Synthetic
YPTYTEWSV

SEQ ID NO: 2623 - protein, 9 aa, synthetic construct
  REGION 1..9: note = Synthetic
YQTYTEWSV

SEQ ID NO: 2624 - protein, 9 aa, synthetic construct
  REGION 1..9: note = Synthetic
YSTGDLRAY

SEQ ID NO: 2625 - protein, 9 aa, synthetic construct
  REGION 1..9: note = Synthetic
YTLRYLASY

SEQ ID NO: 2626 - protein, 9 aa, synthetic construct
  REGION 1..9: note = Synthetic
YVLVKTNMV

SEQ ID NO: 2627 - protein, 9 aa, synthetic construct
  REGION 1..9: note = Synthetic
YYDYEDATF

SEQ ID NO: 2628 - protein, 15 aa, synthetic construct
  REGION 1..15: note = Synthetic
AAFIALYPNSQLAPT

SEQ ID NO: 2629 - protein, 14 aa, synthetic construct
  REGION 1..14: note = Synthetic
GGAEYNLALGQRRA

SEQ ID NO: 2630 - protein, 16 aa, synthetic construct
  REGION 1..16: note = Synthetic
GGAEYNLALGQRRADA

SEQ ID NO: 2631 - protein, 12 aa, synthetic construct
  REGION 1..12: note = Synthetic
IALYPNSQLAPT

SEQ ID NO: 2632 - protein, 18 aa, synthetic construct
  REGION 1..18: note = Synthetic
KPDQGEVVAVGPGKKTED

SEQ ID NO: 2633 - protein, 19 aa, synthetic construct
  REGION 1..19: note = Synthetic
KPDQGEVVAVGPGKKTEDG

SEQ ID NO: 2634 - protein, 14 aa, synthetic construct
  REGION 1..14: note = Synthetic
LAEVLDYHNFVLTQ

SEQ ID NO: 2635 - protein, 15 aa, synthetic construct
  REGION 1..15: note = Synthetic
QSIALSSLMVAQAIP

SEQ ID NO: 2636 - protein, 23 aa, synthetic construct
  REGION 1..23: note = Synthetic
SIGVLGYQKTVDHTKVNSKLSLF

SEQ ID NO: 2637 - protein, 14 aa, synthetic construct
  REGION 1..14: note = Synthetic
AAHADWNNQSIVKT

SEQ ID NO: 2638 - protein, 6 aa, synthetic construct
  REGION 1..6: note = Synthetic
AALGRG

SEQ ID NO: 2639 - protein, 14 aa, synthetic construct
  REGION 1..14: note = Synthetic
AALGRGHSLYASYE

SEQ ID NO: 2640 - protein, 14 aa, synthetic construct
  REGION 1..14: note = Synthetic
AAPLRRTTLAMALG

SEQ ID NO: 2641 - protein, 14 aa, synthetic construct
  REGION 1..14: note = Synthetic
AAPLSITLQAGAHA

SEQ ID NO: 2642 - protein, 14 aa, synthetic construct
  REGION 1..14: note = Synthetic
ADAQGDIVATELPS

SEQ ID NO: 2643 - protein, 14 aa, synthetic construct
  REGION 1..14: note = Synthetic
ADSGFYLDATLRAS

SEQ ID NO: 2644 - protein, 4 aa, synthetic construct
  REGION 1..4: note = Synthetic
AELA

SEQ ID NO: 2645 - protein, 14 aa, synthetic construct
  REGION 1..14: note = Synthetic
AELAVFRAGGGAYR

SEQ ID NO: 2646 - protein, 14 aa, synthetic construct
  REGION 1..14: note = Synthetic
AELQFRNGSVTSSG

SEQ ID NO: 2647 - protein, 14 aa, synthetic construct
  REGION 1..14: note = Synthetic
AGGRWHLGGLAGYT

SEQ ID NO: 2648 - protein, 14 aa, synthetic construct
  REGION 1..14: note = Synthetic
AGVAAMQGAVVHLQ

SEQ ID NO: 2649 - protein, 14 aa, synthetic construct
  REGION 1..14: note = Synthetic
AGYTRGDRGFTGDG

SEQ ID NO: 2650 - protein, 14 aa, synthetic construct
  REGION 1..14: note = Synthetic
ALASQARWTGATRA

SEQ ID NO: 2651 - protein, 14 aa, synthetic construct
  REGION 1..14: note = Synthetic
AMPWTFHAGYRYSW

SEQ ID NO: 2652 - protein, 20 aa, synthetic construct
  REGION 1..20: note = Synthetic
AMQGAVVHLQRATIRRGDAP

SEQ ID NO: 2653 - protein, 9 aa, synthetic construct
  REGION 1..9: note = Synthetic
ANGLRVRDE

SEQ ID NO: 2654 - protein, 14 aa, synthetic construct
  REGION 1..14: note = Synthetic
ANGLRVRDEGGSSV

SEQ ID NO: 2655 - protein, 14 aa, synthetic construct
  REGION 1..14: note = Synthetic
ANKDGKVDIGTYRY

SEQ ID NO: 2656 - protein, 14 aa, synthetic construct
  REGION 1..14: note = Synthetic
APAAVSVLGASELT

SEQ ID NO: 2657 - protein, 14 aa, synthetic construct
  REGION 1..14: note = Synthetic
APPAPKPAPQPGPQ

SEQ ID NO: 2658 - protein, 14 aa, synthetic construct
  REGION 1..14: note = Synthetic
AQGILLENPAAELQ

SEQ ID NO: 2659 - protein, 14 aa, synthetic construct
  REGION 1..14: note = Synthetic
ARWTGATRAVDSLS

SEQ ID NO: 2660 - protein, 14 aa, synthetic construct
  REGION 1..14: note = Synthetic
ASLEAGRRFTHADG

SEQ ID NO: 2661 - protein, 14 aa, synthetic construct
  REGION 1..14: note = Synthetic
ASYEYSKGPKLAMP

SEQ ID NO: 2662 - protein, 9 aa, synthetic construct
  REGION 1..9: note = Synthetic
ATFTLANKD

SEQ ID NO: 2663 - protein, 14 aa, synthetic construct
  REGION 1..14: note = Synthetic
ATFTLANKDGKVDI

SEQ ID NO: 2664 - protein, 14 aa, synthetic construct
  REGION 1..14: note = Synthetic
ATRAVDSLSIDNAT

SEQ ID NO: 2665 - protein, 15 aa, synthetic construct
  REGION 1..15: note = Synthetic
DDDGIALYVAGEQAQ

SEQ ID NO: 2666 - protein, 14 aa, synthetic construct
  REGION 1..14: note = Synthetic
DDGIALYVAGEQAQ

SEQ ID NO: 2667 - protein, 14 aa, synthetic construct
  REGION 1..14: note = Synthetic
DGGHITGGRAAGVA

SEQ ID NO: 2668 - protein, 16 aa, synthetic construct
  REGION 1..16: note = Synthetic
DGIRRFLGTVTVKAGK

SEQ ID NO: 2669 - protein, 14 aa, synthetic construct
  REGION 1..14: note = Synthetic
DGSVDFQQPAEAGR

SEQ ID NO: 2670 - protein, 14 aa, synthetic construct
  REGION 1..14: note = Synthetic
DGYAVKGKYRTHGV

SEQ ID NO: 2671 - protein, 14 aa, synthetic construct
  REGION 1..14: note = Synthetic
DIVATELPSIPGTS

SEQ ID NO: 2672 - protein, 14 aa, synthetic construct
  REGION 1..14: note = Synthetic
DKLVVMQDASGQHR

SEQ ID NO: 2673 - protein, 14 aa, synthetic construct
  REGION 1..14: note = Synthetic
DLGLSDKLVVMQDA

SEQ ID NO: 2674 - protein, 15 aa, synthetic construct
  REGION 1..15: note = Synthetic
DNATWVMTDNSNVGA

SEQ ID NO: 2675 - protein, 19 aa, synthetic construct
  REGION 1..19: note = Synthetic
DNATWVMTDNSNVGALRLA

SEQ ID NO: 2676 - protein, 14 aa, synthetic construct
  REGION 1..14: note = Synthetic
DNRAGRRFDQKVAG

SEQ ID NO: 2677 - protein, 14 aa, synthetic construct
  REGION 1..14: note = Synthetic
EAGRFKVLTVNTLA

SEQ ID NO: 2678 - protein, 14 aa, synthetic construct
  REGION 1..14: note = Synthetic
ELAQSIVEAPELGA

SEQ ID NO: 2679 - protein, 14 aa, synthetic construct
  REGION 1..14: note = Synthetic
ELGAAIRVGRGARV

SEQ ID NO: 2680 - protein, 14 aa, synthetic construct
  REGION 1..14: note = Synthetic
ELGADHAVAVAGGR

SEQ ID NO: 2681 - protein, 14 aa, synthetic construct
  REGION 1..14: note = Synthetic
ELPSIPGTSIGPLD

SEQ ID NO: 2682 - protein, 14 aa, synthetic construct
  REGION 1..14: note = Synthetic
EPVKLTLTGGADAQ

SEQ ID NO: 2683 - protein, 14 aa, synthetic construct
  REGION 1..14: note = Synthetic
EQAQASIADSTLQG

SEQ ID NO: 2684 - protein, 14 aa, synthetic construct
  REGION 1..14: note = Synthetic
ERGANVTVQRSAIV

SEQ ID NO: 2685 - protein, 14 aa, synthetic construct
  REGION 1..14: note = Synthetic
ERQHGIHIQGSDPG

SEQ ID NO: 2686 - protein, 14 aa, synthetic construct
  REGION 1..14: note = Synthetic
EVGKRIELAGGRQV

SEQ ID NO: 2687 - protein, 14 aa, synthetic construct
  REGION 1..14: note = Synthetic
FDGAGTVHTNGIAH

SEQ ID NO: 2688 - protein, 14 aa, synthetic construct
  REGION 1..14: note = Synthetic
FQQPAEAGRFKVLT

SEQ ID NO: 2689 - protein, 14 aa, synthetic construct
  REGION 1..14: note = Synthetic
FRAGGGAYRAANGL

SEQ ID NO: 2690 - protein, 14 aa, synthetic construct
  REGION 1..14: note = Synthetic
GAHAQGKALLYRVL

SEQ ID NO: 2691 - protein, 14 aa, synthetic construct
  REGION 1..14: note = Synthetic
GARVTVSGGSLSAP

SEQ ID NO: 2692 - protein, 14 aa, synthetic construct
  REGION 1..14: note = Synthetic
GAYRAANGLRVRDE

SEQ ID NO: 2693 - protein, 14 aa, synthetic construct
  REGION 1..14: note = Synthetic
GDAPAGGAVPGGAV

SEQ ID NO: 2694 - protein, 14 aa, synthetic construct
  REGION 1..14: note = Synthetic
GGAVPGGAVPGGFG

SEQ ID NO: 2695 - protein, 14 aa, synthetic construct
  REGION 1..14: note = Synthetic
GGAVPGGFGPVLDG

SEQ ID NO: 2696 - protein, 14 aa, synthetic construct
  REGION 1..14: note = Synthetic
GGFGPVLDGWYGVD

SEQ ID NO: 2697 - protein, 14 aa, synthetic construct
  REGION 1..14: note = Synthetic
GGLHIGALQSLQPE

SEQ ID NO: 2698 - protein, 14 aa, synthetic construct
  REGION 1..14: note = Synthetic
GGVQIERGANVTVQ

SEQ ID NO: 2699 - protein, 14 aa, synthetic construct
  REGION 1..14: note = Synthetic
GHSLYASYEYSKGP

SEQ ID NO: 2700 - protein, 14 aa, synthetic construct
  REGION 1..14: note = Synthetic
GHTDSVHVGGYATY

SEQ ID NO: 2701 - protein, 14 aa, synthetic construct
  REGION 1..14: note = Synthetic
GIAHRTELRGTRAE

SEQ ID NO: 2702 - protein, 14 aa, synthetic construct
  REGION 1..14: note = Synthetic
GKALLYRVLPEPVK

SEQ ID NO: 2703 - protein, 14 aa, synthetic construct
  REGION 1..14: note = Synthetic
GLGMAAALGRGHSL

SEQ ID NO: 2704 - protein, 14 aa, synthetic construct
  REGION 1..14: note = Synthetic
GNVIETGGARRFAP

SEQ ID NO: 2705 - protein, 14 aa, synthetic construct
  REGION 1..14: note = Synthetic
GPLDVALASQARWT

SEQ ID NO: 2706 - protein, 9 aa, synthetic construct
  REGION 1..9: note = Synthetic
GQHRLWVRN

SEQ ID NO: 2707 - protein, 14 aa, synthetic construct
  REGION 1..14: note = Synthetic
GRGFAQRQQLDNRA

SEQ ID NO: 2708 - protein, 14 aa, synthetic construct
  REGION 1..14: note = Synthetic
GRLGLEVGKRIELA

SEQ ID NO: 2709 - protein, 14 aa, synthetic construct
  REGION 1..14: note = Synthetic
GRQVQPYIKASVLQ

SEQ ID NO: 2710 - protein, 19 aa, synthetic construct
  REGION 1..19: note = Synthetic
GRRFTHADGWFLEPQAELA

SEQ ID NO: 2711 - protein, 14 aa, synthetic construct
  REGION 1..14: note = Synthetic
GSEPASANTLLLVQ

SEQ ID NO: 2712 - protein, 14 aa, synthetic construct
  REGION 1..14: note = Synthetic
GSSVLGRLGLEVGK

SEQ ID NO: 2713 - protein, 14 aa, synthetic construct
  REGION 1..14: note = Synthetic
GTTIKVSGRQAQGI

SEQ ID NO: 2714 - protein, 14 aa, synthetic construct
  REGION 1..14: note = Synthetic
GTVTVKAGKLVADH

SEQ ID NO: 2715 - protein, 14 aa, synthetic construct
  REGION 1..14: note = Synthetic
HAVAVAGGRWHLGG

SEQ ID NO: 2716 - protein, 14 aa, synthetic construct
  REGION 1..14: note = Synthetic
IELAGGRQVQPYIK

SEQ ID NO: 2717 - protein, 14 aa, synthetic construct
  REGION 1..14: note = Synthetic
IHIQGSDPGGVRTA

SEQ ID NO: 2718 - protein, 14 aa, synthetic construct
  REGION 1..14: note = Synthetic
IRRFLGTVTVKAGK

SEQ ID NO: 2719 - protein, 14 aa, synthetic construct
  REGION 1..14: note = Synthetic
IRVGRGARVTVSGG

SEQ ID NO: 2720 - protein, 9 aa, synthetic construct
  REGION 1..9: note = Synthetic
ITLQAGAHA

SEQ ID NO: 2721 - protein, 14 aa, synthetic construct
  REGION 1..14: note = Synthetic
ITLQAGAHAQGKAL

SEQ ID NO: 2722 - protein, 14 aa, synthetic construct
  REGION 1..14: note = Synthetic
IVEAPELGAAIRVG

SEQ ID NO: 2723 - protein, 14 aa, synthetic construct
  REGION 1..14: note = Synthetic
IVKTGERQHGIHIQ

SEQ ID NO: 2724 - protein, 14 aa, synthetic construct
  REGION 1..14: note = Synthetic
KAGKLVADHATLAN

SEQ ID NO: 2725 - protein, 14 aa, synthetic construct
  REGION 1..14: note = Synthetic
KGKYRTHGVGASLE

SEQ ID NO: 2726 - protein, 14 aa, synthetic construct
  REGION 1..14: note = Synthetic
KPAPQPGPQPPQPP

SEQ ID NO: 2727 - protein, 14 aa, synthetic construct
  REGION 1..14: note = Synthetic
KVAGFELGADHAVA

SEQ ID NO: 2728 - protein, 14 aa, synthetic construct
  REGION 1..14: note = Synthetic
KVAGSDGYAVKGKY

SEQ ID NO: 2729 - protein, 14 aa, synthetic construct
  REGION 1..14: note = Synthetic
KVDIGTYRYRLAAN

SEQ ID NO: 2730 - protein, 14 aa, synthetic construct
  REGION 1..14: note = Synthetic
KVLTVNTLAGSGLF

SEQ ID NO: 2731 - protein, 14 aa, synthetic construct
  REGION 1..14: note = Synthetic
LAANGNGQWSLVGA

SEQ ID NO: 2732 - protein, 14 aa, synthetic construct
  REGION 1..14: note = Synthetic
LAMPWTFHAGYRYS

SEQ ID NO: 2733 - protein, 14 aa, synthetic construct
  REGION 1..14: note = Synthetic
LASTLWYAESNALS

SEQ ID NO: 2734 - protein, 14 aa, synthetic construct
  REGION 1..14: note = Synthetic
LENDFKVAGSDGYA

SEQ ID NO: 2735 - protein, 14 aa, synthetic construct
  REGION 1..14: note = Synthetic
LENPAAELQFRNGS

SEQ ID NO: 2736 - protein, 14 aa, synthetic construct
  REGION 1..14: note = Synthetic
LGAAPAAHADWNNQ

SEQ ID NO: 2737 - protein, 18 aa, synthetic construct
  REGION 1..18: note = Synthetic
LGGLAGYTRGDRGFTGDG

SEQ ID NO: 2738 - protein, 5 aa, synthetic construct
  REGION 1..5: note = Synthetic
LLENP

SEQ ID NO: 2739 - protein, 14 aa, synthetic construct
  REGION 1..14: note = Synthetic
LLVQTPLGSAATFT

SEQ ID NO: 2740 - protein, 14 aa, synthetic construct
  REGION 1..14: note = Synthetic
LPPSRVVLRDTNVT

SEQ ID NO: 2741 - protein, 9 aa, synthetic construct
  REGION 1..9: note = Synthetic
LQPEDLPPS

SEQ ID NO: 2742 - protein, 14 aa, synthetic construct
  REGION 1..14: note = Synthetic
LQPEDLPPSRVVLR

SEQ ID NO: 2743 - protein, 14 aa, synthetic construct
  REGION 1..14: note = Synthetic
LRASRLENDFKVAG

SEQ ID NO: 2744 - protein, 14 aa, synthetic construct
  REGION 1..14: note = Synthetic
LRLASDGSVDFQQP

SEQ ID NO: 2745 - protein, 14 aa, synthetic construct
  REGION 1..14: note = Synthetic
LSAAANAAVNTGGV

SEQ ID NO: 2746 - protein, 14 aa, synthetic construct
  REGION 1..14: note = Synthetic
LSAPHGNVIETGGA

SEQ ID NO: 2747 - protein, 14 aa, synthetic construct
  REGION 1..14: note = Synthetic
LSDDGIRRFLGTVT

SEQ ID NO: 2748 - protein, 14 aa, synthetic construct
  REGION 1..14: note = Synthetic
LVGAKAPPAPKPAP

SEQ ID NO: 2749 - protein, 14 aa, synthetic construct
  REGION 1..14: note = Synthetic
LYVAGEQAQASIAD

SEQ ID NO: 2750 - protein, 14 aa, synthetic construct
  REGION 1..14: note = Synthetic
MALGALGAAPAAHA

SEQ ID NO: 2751 - protein, 14 aa, synthetic construct
  REGION 1..14: note = Synthetic
MNMSLSRIVKAAPL

SEQ ID NO: 2752 - protein, 9 aa, synthetic construct
  REGION 1..9: note = Synthetic
MQDASGQHR

SEQ ID NO: 2753 - protein, 14 aa, synthetic construct
  REGION 1..14: note = Synthetic
MQGAVVHLQRATIR

SEQ ID NO: 2754 - protein, 14 aa, synthetic construct
  REGION 1..14: note = Synthetic
NAAVNTGGVGLAST

SEQ ID NO: 2755 - protein, 14 aa, synthetic construct
  REGION 1..14: note = Synthetic
NALSKRLGELRLNP

SEQ ID NO: 2756 - protein, 14 aa, synthetic construct
  REGION 1..14: note = Synthetic
NGQWSLVGAKAPPA

SEQ ID NO: 2757 - protein, 14 aa, synthetic construct
  REGION 1..14: note = Synthetic
NTLAGSGLFRMNVF

SEQ ID NO: 2758 - protein, 14 aa, synthetic construct
  REGION 1..14: note = Synthetic
PAGRELSAAANAAV

SEQ ID NO: 2759 - protein, 14 aa, synthetic construct
  REGION 1..14: note = Synthetic
PAPQPPAGRELSAA

SEQ ID NO: 2760 - protein, 14 aa, synthetic construct
  REGION 1..14: note = Synthetic
PGPQPPQPPQPQPE

SEQ ID NO: 2761 - protein, 14 aa, synthetic construct
  REGION 1..14: note = Synthetic
PGTSIGPLDVALAS

SEQ ID NO: 2762 - protein, 14 aa, synthetic construct
  REGION 1..14: note = Synthetic
PLGSAATFTLANKD

SEQ ID NO: 2763 - protein, 14 aa, synthetic construct
  REGION 1..14: note = Synthetic
PQPEAPAPQPPAGR

SEQ ID NO: 2764 - protein, 14 aa, synthetic construct
  REGION 1..14: note = Synthetic
PQPPQPQPEAPAPQ

SEQ ID NO: 2765 - protein, 14 aa, synthetic construct
  REGION 1..14: note = Synthetic
PYIKASVLQEFDGA

SEQ ID NO: 2766 - protein, 14 aa, synthetic construct
  REGION 1..14: note = Synthetic
RFAPQAAPLSITLQ

SEQ ID NO: 2767 - protein, 14 aa, synthetic construct
  REGION 1..14: note = Synthetic
RLGELRLNPDAGGA

SEQ ID NO: 2768 - protein, 14 aa, synthetic construct
  REGION 1..14: note = Synthetic
RLNPDAGGAWGRGF

SEQ ID NO: 2769 - protein, 14 aa, synthetic construct
  REGION 1..14: note = Synthetic
RNGSVTSSGQLSDD

SEQ ID NO: 2770 - protein, 14 aa, synthetic construct
  REGION 1..14: note = Synthetic
RRFDQKVAGFELGA

SEQ ID NO: 2771 - protein, 14 aa, synthetic construct
  REGION 1..14: note = Synthetic
RTTLAMALGALGAA

SEQ ID NO: 2772 - protein, 14 aa, synthetic construct
  REGION 1..14: note = Synthetic
SAIVDGGLHIGALQ

SEQ ID NO: 2773 - protein, 14 aa, synthetic construct
  REGION 1..14: note = Synthetic
SANTLLLVQTPLGS

SEQ ID NO: 2774 - protein, 14 aa, synthetic construct
  REGION 1..14: note = Synthetic
SDPGGVRTASGTTI

SEQ ID NO: 2775 - protein, 14 aa, synthetic construct
  REGION 1..14: note = Synthetic
SELTLDGGHITGGR

SEQ ID NO: 2776 - protein, 9 aa, synthetic construct
  REGION 1..9: note = Synthetic
SGLFRMNVF

SEQ ID NO: 2777 - protein, 14 aa, synthetic construct
  REGION 1..14: note = Synthetic
SGLFRMNVFADLGL

SEQ ID NO: 2778 - protein, 14 aa, synthetic construct
  REGION 1..14: note = Synthetic
SGSSVELAQSIVEA

SEQ ID NO: 2779 - protein, 14 aa, synthetic construct
  REGION 1..14: note = Synthetic
SIADSTLQGAGGVQ

SEQ ID NO: 2780 - protein, 14 aa, synthetic construct
  REGION 1..14: note = Synthetic
SKGPKLAMPWTFHA

SEQ ID NO: 2781 - protein, 14 aa, synthetic construct
  REGION 1..14: note = Synthetic
SNVGALRLASDGSV

SEQ ID NO: 2782 - protein, 14 aa, synthetic construct
  REGION 1..14: note = Synthetic
SRIVKAAPLRRTTL

SEQ ID NO: 2783 - protein, 14 aa, synthetic construct
  REGION 1..14: note = Synthetic
SVLGASELTLDGGH

SEQ ID NO: 2784 - protein, 9 aa, synthetic construct
  REGION 1..9: note = Synthetic
SVLQEFDGA

SEQ ID NO: 2785 - protein, 14 aa, synthetic construct
  REGION 1..14: note = Synthetic
SVLQEFDGAGTVHT

SEQ ID NO: 2786 - protein, 4 aa, synthetic construct
  REGION 1..4: note = Synthetic
TELR

SEQ ID NO: 2787 - protein, 14 aa, synthetic construct
  REGION 1..14: note = Synthetic
TELRGTRAELGLGM

SEQ ID NO: 2788 - protein, 14 aa, synthetic construct
  REGION 1..14: note = Synthetic
TGDGGGHTDSVHVG

SEQ ID NO: 2789 - protein, 14 aa, synthetic construct
  REGION 1..14: note = Synthetic
TGGARRFAPQAAPL

SEQ ID NO: 2790 - protein, 14 aa, synthetic construct
  REGION 1..14: note = Synthetic
TGGRAAGVAAMQGA

SEQ ID NO: 2791 - protein, 14 aa, synthetic construct
  REGION 1..14: note = Synthetic
TGGVGLASTLWYAE

SEQ ID NO: 2792 - protein, 14 aa, synthetic construct
  REGION 1..14: note = Synthetic
THGVGASLEAGRRF

SEQ ID NO: 2793 - protein, 9 aa, synthetic construct
  REGION 1..9: note = Synthetic
TIRRGDAPA

SEQ ID NO: 2794 - protein, 14 aa, synthetic construct
  REGION 1..14: note = Synthetic
TLANVGDTWDDDGI

SEQ ID NO: 2795 - protein, 14 aa, synthetic construct
  REGION 1..14: note = Synthetic
TLQGAGGVQIERGA

SEQ ID NO: 2796 - protein, 14 aa, synthetic construct
  REGION 1..14: note = Synthetic
TLTGGADAQGDIVA

SEQ ID NO: 2797 - protein, 14 aa, synthetic construct
  REGION 1..14: note = Synthetic
TNVTAVPASGAPAA

SEQ ID NO: 2798 - protein, 14 aa, synthetic construct
  REGION 1..14: note = Synthetic
TRAELGLGMAAALG

SEQ ID NO: 2799 - protein, 14 aa, synthetic construct
  REGION 1..14: note = Synthetic
TSSGQLSDDGIRRF

SEQ ID NO: 2800 - protein, 14 aa, synthetic construct
  REGION 1..14: note = Synthetic
TVHTNGIAHRTELR

SEQ ID NO: 2801 - protein, 14 aa, synthetic construct
  REGION 1..14: note = Synthetic
TYRYRLAANGNGQW

SEQ ID NO: 2802 - protein, 14 aa, synthetic construct
  REGION 1..14: note = Synthetic
VADHATLANVGDTW

SEQ ID NO: 2803 - protein, 14 aa, synthetic construct
  REGION 1..14: note = Synthetic
VHVGGYATYIADSG

SEQ ID NO: 2804 - protein, 9 aa, synthetic construct
  REGION 1..9: note = Synthetic
VLDGWYGVD

SEQ ID NO: 2805 - protein, 14 aa, synthetic construct
  REGION 1..14: note = Synthetic
VPASGAPAAVSVLG

SEQ ID NO: 2806 - protein, 14 aa, synthetic construct
  REGION 1..14: note = Synthetic
VRDEGGSSVLGRLG

SEQ ID NO: 2807 - protein, 14 aa, synthetic construct
  REGION 1..14: note = Synthetic
VRTASGTTIKVSGR

SEQ ID NO: 2808 - protein, 14 aa, synthetic construct
  REGION 1..14: note = Synthetic
VSGGSLSAPHGNVI

SEQ ID NO: 2809 - protein, 14 aa, synthetic construct
  REGION 1..14: note = Synthetic
VSGRQAQGILLENP

SEQ ID NO: 2810 - protein, 14 aa, synthetic construct
  REGION 1..14: note = Synthetic
VTVQRSAIVDGGLH

SEQ ID NO: 2811 - protein, 14 aa, synthetic construct
  REGION 1..14: note = Synthetic
VVLRDTNVTAVPAS

SEQ ID NO: 2812 - protein, 14 aa, synthetic construct
  REGION 1..14: note = Synthetic
WNNQSIVKTGERQH

SEQ ID NO: 2813 - protein, 14 aa, synthetic construct
  REGION 1..14: note = Synthetic
WVRNSGSEPASANT

SEQ ID NO: 2814 - protein, 14 aa, synthetic construct
  REGION 1..14: note = Synthetic
WYAESNALSKRLGE

SEQ ID NO: 2815 - protein, 14 aa, synthetic construct
  REGION 1..14: note = Synthetic
YATYIADSGFYLDA

SEQ ID NO: 2816 - protein, 9 aa, synthetic construct
  REGION 1..9: note = Synthetic
YGVDVSGSS

SEQ ID NO: 2817 - protein, 14 aa, synthetic construct
  REGION 1..14: note = Synthetic
YGVDVSGSSVELAQ

SEQ ID NO: 2818 - protein, 14 aa, synthetic construct
  REGION 1..14: note = Synthetic
YLDATLRASRLEND

SEQ ID NO: 2819 - protein, 14 aa, synthetic construct
  REGION 1..14: note = Synthetic
YRVLPEPVKLTLTG

SEQ ID NO: 2820 - protein, 16 aa, synthetic construct
  REGION 1..16: note = Synthetic
VKAQNITNKRAALIEA

SEQ ID NO: 2821 - protein, 16 aa, synthetic construct
  REGION 1..16: note = Synthetic
YYSNVTATRLLSSTNS

SEQ ID NO: 2822 - protein, 15 aa, synthetic construct
  REGION 1..15: note = Synthetic
SPNLTDERAAQAGVT

SEQ ID NO: 2823 - protein, 15 aa, synthetic construct
  REGION 1..15: note = Synthetic
SSRASDERAAHLPTS

SEQ ID NO: 2824 - protein, 15 aa, synthetic construct
  REGION 1..15: note = Synthetic
QVVHNSYNRPAYSPG

SEQ ID NO: 2825 - protein, 9 aa, synthetic construct
  REGION 1..9: note = Synthetic
AEGGEIHEL

SEQ ID NO: 2826 - protein, 12 aa, synthetic construct
  REGION 1..12: note = Synthetic
AENLISNGIGKY

SEQ ID NO: 2827 - protein, 9 aa, synthetic construct
  REGION 1..9: note = Synthetic
AEVDGDVKL

SEQ ID NO: 2828 - protein, 9 aa, synthetic construct
  REGION 1..9: note = Synthetic
AIYTAEIHK

SEQ ID NO: 2829 - protein, 9 aa, synthetic construct
  REGION 1..9: note = Synthetic
APVFHMTNY

SEQ ID NO: 2830 - protein, 16 aa, synthetic construct
  REGION 1..16: note = Synthetic
APVFHMTNYLEQPVSN

SEQ ID NO: 2831 - protein, 8 aa, synthetic construct
  REGION 1..8: note = Synthetic
AQRLNEIY

SEQ ID NO: 2832 - protein, 9 aa, synthetic construct
  REGION 1..9: note = Synthetic
ARVPHAYSL

SEQ ID NO: 2833 - protein, 9 aa, synthetic construct
  REGION 1..9: note = Synthetic
AVRDLERAM

SEQ ID NO: 2834 - protein, 13 aa, synthetic construct
  REGION 1..13: note = Synthetic
AVRDLERAMTTLK

SEQ ID NO: 2835 - protein, 9 aa, synthetic construct
  REGION 1..9: note = Synthetic
DALLRLQAM

SEQ ID NO: 2836 - protein, 9 aa, synthetic construct
  REGION 1..9: note = Synthetic
DIKEKVINL

SEQ ID NO: 2837 - protein, 8 aa, synthetic construct
  REGION 1..8: note = Synthetic
DQGLFKVL

SEQ ID NO: 2838 - protein, 9 aa, synthetic construct
  REGION 1..9: note = Synthetic
DTGVDTRIW

SEQ ID NO: 2839 - protein, 12 aa, synthetic construct
  REGION 1..12: note = Synthetic
EPIGSLAIEEAM

SEQ ID NO: 2840 - protein, 10 aa, synthetic construct
  REGION 1..10: note = Synthetic
EPIRDALNAM

SEQ ID NO: 2841 - protein, 8 aa, synthetic construct
  REGION 1..8: note = Synthetic
FPKLGKTL

SEQ ID NO: 2842 - protein, 9 aa, synthetic construct
  REGION 1..9: note = Synthetic
FRSVNAVAF

SEQ ID NO: 2843 - protein, 10 aa, synthetic construct
  REGION 1..10: note = Synthetic
GKIIDNTEQL

SEQ ID NO: 2844 - protein, 9 aa, synthetic construct
  REGION 1..9: note = Synthetic
GLNEKLVFY

SEQ ID NO: 2845 - protein, 11 aa, synthetic construct
  REGION 1..11: note = Synthetic
GMYGGTYLVEK

SEQ ID NO: 2846 - protein, 14 aa, synthetic construct
  REGION 1..14: note = Synthetic
GPPISLERLDVGTN

SEQ ID NO: 2847 - protein, 10 aa, synthetic construct
  REGION 1..10: note = Synthetic
GPRQAQVSFL

SEQ ID NO: 2848 - protein, 11 aa, synthetic construct
  REGION 1..11: note = Synthetic
GRLVPQVRVID

SEQ ID NO: 2849 - protein, 10 aa, synthetic construct
  REGION 1..10: note = Synthetic
GSAPISMGFR

SEQ ID NO: 2850 - protein, 9 aa, synthetic construct
  REGION 1..9: note = Synthetic
HILAKSTAL

SEQ ID NO: 2851 - protein, 9 aa, synthetic construct
  REGION 1..9: note = Synthetic
HYREVNLVY

SEQ ID NO: 2852 - protein, 9 aa, synthetic construct
  REGION 1..9: note = Synthetic
IPPMKNLAL

SEQ ID NO: 2853 - protein, 12 aa, synthetic construct
  REGION 1..12: note = Synthetic
IPYQGSGKGVSF

SEQ ID NO: 2854 - protein, 9 aa, synthetic construct
  REGION 1..9: note = Synthetic
ISKESQHVY

SEQ ID NO: 2855 - protein, 9 aa, synthetic construct
  REGION 1..9: note = Synthetic
IVSSHFFVY

SEQ ID NO: 2856 - protein, 10 aa, synthetic construct
  REGION 1..10: note = Synthetic
KEIKETGRLF

SEQ ID NO: 2857 - protein, 9 aa, synthetic construct
  REGION 1..9: note = Synthetic
KESQHVYYL

SEQ ID NO: 2858 - protein, 9 aa, synthetic construct
  REGION 1..9: note = Synthetic
KIIDNTEQL

SEQ ID NO: 2859 - protein, 8 aa, synthetic construct
  REGION 1..8: note = Synthetic
KKQINRQN

SEQ ID NO: 2860 - protein, 10 aa, synthetic construct
  REGION 1..10: note = Synthetic
KKVDTNFIYQ

SEQ ID NO: 2861 - protein, 9 aa, synthetic construct
  REGION 1..9: note = Synthetic
KLIDGFFPA

SEQ ID NO: 2862 - protein, 11 aa, synthetic construct
  REGION 1..11: note = Synthetic
KPNLSSKRSEL

SEQ ID NO: 2863 - protein, 9 aa, synthetic construct
  REGION 1..9: note = Synthetic
KVSPYLFTV

SEQ ID NO: 2864 - protein, 10 aa, synthetic construct
  REGION 1..10: note = Synthetic
LETRTTNQFL

SEQ ID NO: 2865 - protein, 8 aa, synthetic construct
  REGION 1..8: note = Synthetic
LLKEATEL

SEQ ID NO: 2866 - protein, 9 aa, synthetic construct
  REGION 1..9: note = Synthetic
LLKKGNSLY

SEQ ID NO: 2867 - protein, 10 aa, synthetic construct
  REGION 1..10: note = Synthetic
LPAPIGGMNY

SEQ ID NO: 2868 - protein, 10 aa, synthetic construct
  REGION 1..10: note = Synthetic
MPEETLHQVM

SEQ ID NO: 2869 - protein, 9 aa, synthetic construct
  REGION 1..9: note = Synthetic
PTTIRGQFS

SEQ ID NO: 2870 - protein, 11 aa, synthetic construct
  REGION 1..11: note = Synthetic
QEISRHQALGY

SEQ ID NO: 2871 - protein, 10 aa, synthetic construct
  REGION 1..10: note = Synthetic
RITHVDTESY

SEQ ID NO: 2872 - protein, 8 aa, synthetic construct
  REGION 1..8: note = Synthetic
RPGLKPDL

SEQ ID NO: 2873 - protein, 8 aa, synthetic construct
  REGION 1..8: note = Synthetic
RPIYGLEV

SEQ ID NO: 2874 - protein, 11 aa, synthetic construct
  REGION 1..11: note = Synthetic
RQAGQEMILAV

SEQ ID NO: 2875 - protein, 9 aa, synthetic construct
  REGION 1..9: note = Synthetic
SAVRIATVY

SEQ ID NO: 2876 - protein, 11 aa, synthetic construct
  REGION 1..11: note = Synthetic
SLMPEETLHQV

SEQ ID NO: 2877 - protein, 9 aa, synthetic construct
  REGION 1..9: note = Synthetic
SMIDLVTKF

SEQ ID NO: 2878 - protein, 13 aa, synthetic construct
  REGION 1..13: note = Synthetic
SMLNSQAIDNLRA

SEQ ID NO: 2879 - protein, 8 aa, synthetic construct
  REGION 1..8: note = Synthetic
SMYRVFEV

SEQ ID NO: 2880 - protein, 9 aa, synthetic construct
  REGION 1..9: note = Synthetic
SQQGMFHAY

SEQ ID NO: 2881 - protein, 14 aa, synthetic construct
  REGION 1..14: note = Synthetic
TDTPIVYNDRNLLD

SEQ ID NO: 2882 - protein, 12 aa, synthetic construct
  REGION 1..12: note = Synthetic
VIINDDQGLFKV

SEQ ID NO: 2883 - protein, 10 aa, synthetic construct
  REGION 1..10: note = Synthetic
YESGVRIASL

SEQ ID NO: 2884 - protein, 8 aa, synthetic construct
  REGION 1..8: note = Synthetic
YLKDKALA

SEQ ID NO: 2885 - protein, 11 aa, synthetic construct
  REGION 1..11: note = Synthetic
YVYDHSGEAVK

SEQ ID NO: 2886 - protein, 15 aa, synthetic construct
  REGION 1..15: note = Synthetic
ARVIDPAAQSFTGVV

SEQ ID NO: 2887 - protein, 15 aa, synthetic construct
  REGION 1..15: note = Synthetic
SDRASARVIDPAAQS

SEQ ID NO: 2888 - protein, 15 aa, synthetic construct
  REGION 1..15: note = Synthetic
VPPGKFVTAALLNTP

SEQ ID NO: 2889 - protein, 15 aa, synthetic construct
  REGION 1..15: note = Synthetic
WVTPVIGSQARKCGL

SEQ ID NO: 2890 - DNA, 20 bp, synthetic construct
  misc_feature 1..20: note = Synthetic
  source 1..20: mol_type = other DNA
ggcccagactgagcacgtga

SEQ ID NO: 2891 - DNA, 20 bp, synthetic construct
  misc_feature 1..20: note = Synthetic
  source 1..20: mol_type = other DNA
ggcccagactgagcacgtga

SEQ ID NO: 2892 - DNA, 20 bp, synthetic construct
  misc_feature 1..20: note = Synthetic
  source 1..20: mol_type = other DNA
ggcccagactgagcacgtga

SEQ ID NO: 2893 - DNA, 20 bp, synthetic construct
  misc_feature 1..20: note = Synthetic
  source 1..20: mol_type = other DNA
ggcccagactgagcacgtga

SEQ ID NO: 2894 - DNA, 20 bp, synthetic construct
  misc_feature 1..20: note = Synthetic
  source 1..20: mol_type = other DNA
ggcccagactgagcacgtga

SEQ ID NO: 2895 - DNA, 20 bp, synthetic construct
  misc_feature 1..20: note = Synthetic
  source 1..20: mol_type = other DNA
ggcccagactgagcacgtga

SEQ ID NO: 2896 - DNA, 20 bp, synthetic construct
  misc_feature 1..20: note = Synthetic
  source 1..20: mol_type = other DNA
ggcccagactgagcacgtga

SEQ ID NO: 2897 - DNA, 20 bp, synthetic construct
  misc_feature 1..20: note = Synthetic
  source 1..20: mol_type = other DNA
ggcccagactgagcacgtga

SEQ ID NO: 2898 - DNA, 20 bp, synthetic construct
  misc_feature 1..20: note = Synthetic
  source 1..20: mol_type = other DNA
ggcccagactgagcacgtga

SEQ ID NO: 2899 - DNA, 20 bp, synthetic construct
  misc_feature 1..20: note = Synthetic
  source 1..20: mol_type = other DNA
ggcccagactgagcacgtga

SEQ ID NO: 2900 - DNA, 20 bp, synthetic construct
  misc_feature 1..20: note = Synthetic
  source 1..20: mol_type = other DNA
gagtccgagcagaagaagaa

SEQ ID NO: 2901 - DNA, 20 bp, synthetic construct
  misc_feature 1..20: note = Synthetic
  source 1..20: mol_type = other DNA
gagtccgagcagaagaagaa

SEQ ID NO: 2902 - DNA, 20 bp, synthetic construct
  misc_feature 1..20: note = Synthetic
  source 1..20: mol_type = other DNA
gagtccgagcagaagaagaa

SEQ ID NO: 2903 - DNA, 20 bp, synthetic construct
  misc_feature 1..20: note = Synthetic
  source 1..20: mol_type = other DNA
gagtccgagcagaagaagaa

SEQ ID NO: 2904 - DNA, 20 bp, synthetic construct
  misc_feature 1..20: note = Synthetic
  source 1..20: mol_type = other DNA
gagtccgagcagaagaagaa

SEQ ID NO: 2905 - DNA, 20 bp, synthetic construct
  misc_feature 1..20: note = Synthetic
  source 1..20: mol_type = other DNA
gagtccgagcagaagaagaa

SEQ ID NO: 2906 - DNA, 20 bp, synthetic construct
  misc_feature 1..20: note = Synthetic
  source 1..20: mol_type = other DNA
gagtccgagcagaagaagaa

SEQ ID NO: 2907 - DNA, 20 bp, synthetic construct
  misc_feature 1..20: note = Synthetic
  source 1..20: mol_type = other DNA
gagtccgagcagaagaagaa

SEQ ID NO: 2908 - DNA, 20 bp, synthetic construct
  misc_feature 1..20: note = Synthetic
  source 1..20: mol_type = other DNA
gagtccgagcagaagaagaa

SEQ ID NO: 2909 - DNA, 20 bp, synthetic construct
  misc_feature 1..20: note = Synthetic
  source 1..20: mol_type = other DNA
ggaatcccttctgcagcacc

SEQ ID NO: 2910 - DNA, 20 bp, synthetic construct
  misc_feature 1..20: note = Synthetic
  source 1..20: mol_type = other DNA
ggaatcccttctgcagcacc

SEQ ID NO: 2911 - DNA, 20 bp, synthetic construct
  misc_feature 1..20: note = Synthetic
  source 1..20: mol_type = other DNA
ggaatcccttctgcagcacc

SEQ ID NO: 2912 - DNA, 20 bp, synthetic construct
  misc_feature 1..20: note = Synthetic
  source 1..20: mol_type = other DNA
ggaatcccttctgcagcacc

SEQ ID NO: 2913 - DNA, 20 bp, synthetic construct
  misc_feature 1..20: note = Synthetic
  source 1..20: mol_type = other DNA
ggaatcccttctgcagcacc

SEQ ID NO: 2914 - DNA, 20 bp, synthetic construct
  misc_feature 1..20: note = Synthetic
  source 1..20: mol_type = other DNA
ggaatcccttctgcagcacc

SEQ ID NO: 2915 - DNA, 20 bp, synthetic construct
  misc_feature 1..20: note = Synthetic
  source 1..20: mol_type = other DNA
ggaatcccttctgcagcacc

SEQ ID NO: 2916 - DNA, 20 bp, synthetic construct
  misc_feature 1..20: note = Synthetic
  source 1..20: mol_type = other DNA
ggaatcccttctgcagcacc

SEQ ID NO: 2917 - DNA, 20 bp, synthetic construct
  misc_feature 1..20: note = Synthetic
  source 1..20: mol_type = other DNA
ggaatcccttctgcagcacc

SEQ ID NO: 2918 - DNA, 20 bp, synthetic construct
  misc_feature 1..20: note = Synthetic
  source 1..20: mol_type = other DNA
ggaatcccttctgcagcacc

SEQ ID NO: 2919 - DNA, 20 bp, synthetic construct
  misc_feature 1..20: note = Synthetic
  source 1..20: mol_type = other DNA
gtcatcttagtcattacctg

SEQ ID NO: 2920 - DNA, 20 bp, synthetic construct
  misc_feature 1..20: note = Synthetic
  source 1..20: mol_type = other DNA
gtcatcttagtcattacctg

SEQ ID NO: 2921 - DNA, 20 bp, synthetic construct
  misc_feature 1..20: note = Synthetic
  source 1..20: mol_type = other DNA
gtcatcttagtcattacctg

SEQ ID NO: 2922 - DNA, 20 bp, synthetic construct
  misc_feature 1..20: note = Synthetic
  source 1..20: mol_type = other DNA
gtcatcttagtcattacctg

SEQ ID NO: 2923 - DNA, 20 bp, synthetic construct
  misc_feature 1..20: note = Synthetic
  source 1..20: mol_type = other DNA
gtcatcttagtcattacctg

SEQ ID NO: 2924 - DNA, 20 bp, synthetic construct
  misc_feature 1..20: note = Synthetic
  source 1..20: mol_type = other DNA
gtcatcttagtcattacctg

SEQ ID NO: 2925 - DNA, 20 bp, synthetic construct
  misc_feature 1..20: note = Synthetic
  source 1..20: mol_type = other DNA
gtcatcttagtcattacctg

SEQ ID NO: 2926 - DNA, 20 bp, synthetic construct
  misc_feature 1..20: note = Synthetic
  source 1..20: mol_type = other DNA
gtcatcttagtcattacctg

SEQ ID NO: 2927 - DNA, 20 bp, synthetic construct
  misc_feature 1..20: note = Synthetic
  source 1..20: mol_type = other DNA
gtcatcttagtcattacctg

SEQ ID NO: 2928 - DNA, 20 bp, synthetic construct
  misc_feature 1..20: note = Synthetic
  source 1..20: mol_type = other DNA
ggcactgcggctggaggtgg

SEQ ID NO: 2929 - DNA, 20 bp, synthetic construct
  misc_feature 1..20: note = Synthetic
  source 1..20: mol_type = other DNA
ggcactgcggctggaggtgg

SEQ ID NO: 2930 - DNA, 20 bp, synthetic construct
  misc_feature 1..20: note = Synthetic
  source 1..20: mol_type = other DNA
ggcactgcggctggaggtgg

SEQ ID NO: 2931 - DNA, 20 bp, synthetic construct
  misc_feature 1..20: note = Synthetic
  source 1..20: mol_type = other DNA
ggcactgcggctggaggtgg

SEQ ID NO: 2932 - DNA, 20 bp, synthetic construct
  misc_feature 1..20: note = Synthetic
  source 1..20: mol_type = other DNA
ggcactgcggctggaggtgg

SEQ ID NO: 2933 - DNA, 20 bp, synthetic construct
  misc_feature 1..20: note = Synthetic
  source 1..20: mol_type = other DNA
ggcactgcggctggaggtgg

SEQ ID NO: 2934 - DNA, 20 bp, synthetic construct
  misc_feature 1..20: note = Synthetic
  source 1..20: mol_type = other DNA
ggcactgcggctggaggtgg

SEQ ID NO: 2935 - DNA, 20 bp, synthetic construct
  misc_feature 1..20: note = Synthetic
  source 1..20: mol_type = other DNA
ggcactgcggctggaggtgg

SEQ ID NO: 2936 - DNA, 20 bp, synthetic construct
  misc_feature 1..20: note = Synthetic
  source 1..20: mol_type = other DNA
ggcactgcggctggaggtgg

SEQ ID NO: 2937 - DNA, 20 bp, synthetic construct
  misc_feature 1..20: note = Synthetic
  source 1..20: mol_type = other DNA
ggcccagactgagcacgtga

SEQ ID NO: 2938 - DNA, 20 bp, synthetic construct
  misc_feature 1..20: note = Synthetic
  source 1..20: mol_type = other DNA
ggcccagactgagcacgtga

SEQ ID NO: 2939 - DNA, 20 bp, synthetic construct
  misc_feature 1..20: note = Synthetic
  source 1..20: mol_type = other DNA
ggcccagactgagcacgtga

SEQ ID NO: 2940 - DNA, 20 bp, synthetic construct
  misc_feature 1..20: note = Synthetic
  source 1..20: mol_type = other DNA
ggcccagactgagcacgtga

SEQ ID NO: 2941 - DNA, 20 bp, synthetic construct
  misc_feature 1..20: note = Synthetic
  source 1..20: mol_type = other DNA
ggcccagactgagcacgtga

SEQ ID NO: 2942 - DNA, 20 bp, synthetic construct
  misc_feature 1..20: note = Synthetic
  source 1..20: mol_type = other DNA
ggcccagactgagcacgtga

SEQ ID NO: 2943 - DNA, 20 bp, synthetic construct
  misc_feature 1..20: note = Synthetic
  source 1..20: mol_type = other DNA
ggcccagactgagcacgtga

SEQ ID NO: 2944 - DNA, 20 bp, synthetic construct
  misc_feature 1..20: note = Synthetic
  source 1..20: mol_type = other DNA
ggcccagactgagcacgtga

SEQ ID NO: 2945 - DNA, 20 bp, synthetic construct
  misc_feature 1..20: note = Synthetic
  source 1..20: mol_type = other DNA
ggcccagactgagcacgtga

SEQ ID NO: 2946 - DNA, 20 bp, synthetic construct
  misc_feature 1..20: note = Synthetic
  source 1..20: mol_type = other DNA
ggcccagactgagcacgtga

SEQ ID NO: 2947 - DNA, 20 bp, synthetic construct
  misc_feature 1..20: note = Synthetic
  source 1..20: mol_type = other DNA
ggcccagactgagcacgtga

SEQ ID NO: 2948 - DNA, 20 bp, synthetic construct
  misc_feature 1..20: note = Synthetic
  source 1..20: mol_type = other DNA
ggcccagactgagcacgtga

SEQ ID NO: 2949 - DNA, 20 bp, synthetic construct
  misc_feature 1..20: note = Synthetic
  source 1..20: mol_type = other DNA
ggcccagactgagcacgtga

SEQ ID NO: 2950 - DNA, 20 bp, synthetic construct
  misc_feature 1..20: note = Synthetic
  source 1..20: mol_type = other DNA
ggcccagactgagcacgtga

SEQ ID NO: 2951 - DNA, 20 bp, synthetic construct
  misc_feature 1..20: note = Synthetic
  source 1..20: mol_type = other DNA
gagtccgagcagaagaagaa

SEQ ID NO: 2952 - DNA, 20 bp, synthetic construct
  misc_feature 1..20: note = Synthetic
  source 1..20: mol_type = other DNA
gagtccgagcagaagaagaa

SEQ ID NO: 2953 - DNA, 20 bp, synthetic construct
  misc_feature 1..20: note = Synthetic
  source 1..20: mol_type = other DNA
gagtccgagcagaagaagaa

SEQ ID NO: 2954 - DNA, 20 bp, synthetic construct
  misc_feature 1..20: note = Synthetic
  source 1..20: mol_type = other DNA
gagtccgagcagaagaagaa

SEQ ID NO: 2955 - DNA, 20 bp, synthetic construct
  misc_feature 1..20: note = Synthetic
  source 1..20: mol_type = other DNA
gagtccgagcagaagaagaa

SEQ ID NO: 2956 - DNA, 20 bp, synthetic construct
  misc_feature 1..20: note = Synthetic
  source 1..20: mol_type = other DNA
gagtccgagcagaagaagaa

SEQ ID NO: 2957 - DNA, 20 bp, synthetic construct
  misc_feature 1..20: note = Synthetic
  source 1..20: mol_type = other DNA
gagtccgagcagaagaagaa

SEQ ID NO: 2958 - DNA, 20 bp, synthetic construct
  misc_feature 1..20: note = Synthetic
  source 1..20: mol_type = other DNA
gagtccgagcagaagaagaa

SEQ ID NO: 2959 - DNA, 20 bp, synthetic construct
  misc_feature 1..20: note = Synthetic
  source 1..20: mol_type = other DNA
gagtccgagcagaagaagaa

SEQ ID NO: 2960 - DNA, 20 bp, synthetic construct
  misc_feature 1..20: note = Synthetic
  source 1..20: mol_type = other DNA
gagtccgagcagaagaagaa

SEQ ID NO: 2961 - DNA, 20 bp, synthetic construct
  misc_feature 1..20: note = Synthetic
  source 1..20: mol_type = other DNA
gagtccgagcagaagaagaa

SEQ ID NO: 2962 - DNA, 20 bp, synthetic construct
  misc_feature 1..20: note = Synthetic
  source 1..20: mol_type = other DNA
ggaatcccttctgcagcacc

SEQ ID NO: 2963 - DNA, 20 bp, synthetic construct
  misc_feature 1..20: note = Synthetic
  source 1..20: mol_type = other DNA
ggaatcccttctgcagcacc

SEQ ID NO: 2964 - DNA, 20 bp, synthetic construct
  misc_feature 1..20: note = Synthetic
  source 1..20: mol_type = other DNA
ggaatcccttctgcagcacc

SEQ ID NO: 2965 - DNA, 20 bp, synthetic construct
  misc_feature 1..20: note = Synthetic
  source 1..20: mol_type = other DNA
ggaatcccttctgcagcacc

SEQ ID NO: 2966 - DNA, 20 bp, synthetic construct
  misc_feature 1..20: note = Synthetic
  source 1..20: mol_type = other DNA
ggaatcccttctgcagcacc

SEQ ID NO: 2967 - DNA, 20 bp, synthetic construct
  misc_feature 1..20: note = Synthetic
  source 1..20: mol_type = other DNA
ggaatcccttctgcagcacc

SEQ ID NO: 2968 - DNA, 20 bp, synthetic construct
  misc_feature 1..20: note = Synthetic
  source 1..20: mol_type = other DNA
ggaatcccttctgcagcacc

SEQ ID NO: 2969 - DNA, 20 bp, synthetic construct
  misc_feature 1..20: note = Synthetic
  source 1..20: mol_type = other DNA
ggaatcccttctgcagcacc

SEQ ID NO: 2970 - DNA, 20 bp, synthetic construct
  misc_feature 1..20: note = Synthetic
  source 1..20: mol_type = other DNA
ggaatcccttctgcagcacc

SEQ ID NO: 2971 - DNA, 20 bp, synthetic construct
  misc_feature 1..20: note = Synthetic
  source 1..20: mol_type = other DNA
ggaatcccttctgcagcacc

SEQ ID NO: 2972 - DNA, 20 bp, synthetic construct
  misc_feature 1..20: note = Synthetic
  source 1..20: mol_type = other DNA
ggaatcccttctgcagcacc

SEQ ID NO: 2973 - DNA, 20 bp, synthetic construct
  misc_feature 1..20: note = Synthetic
  source 1..20: mol_type = other DNA
gtcatcttagtcattacctg

SEQ ID NO: 2974 - DNA, 20 bp, synthetic construct
  misc_feature 1..20: note = Synthetic
  source 1..20: mol_type = other DNA
gtcatcttagtcattacctg

SEQ ID NO: 2975 - DNA, 20 bp, synthetic construct
  misc_feature 1..20: note = Synthetic
  source 1..20: mol_type = other DNA
gtcatcttagtcattacctg

SEQ ID NO: 2976 - DNA, 20 bp, synthetic construct
  misc_feature 1..20: note = Synthetic
  source 1..20: mol_type = other DNA
gtcatcttagtcattacctg

SEQ ID NO: 2977 - DNA, 20 bp, synthetic construct
  misc_feature 1..20: note = Synthetic
  source 1..20: mol_type = other DNA
gtcatcttagtcattacctg

SEQ ID NO: 2978 - DNA, 20 bp, synthetic construct
  misc_feature 1..20: note = Synthetic
  source 1..20: mol_type = other DNA
gtcatcttagtcattacctg

SEQ ID NO: 2979 - DNA, 20 bp, synthetic construct
  misc_feature 1..20: note = Synthetic
  source 1..20: mol_type = other DNA
gtcatcttagtcattacctg

SEQ ID NO: 2980 - DNA, 20 bp, synthetic construct
  misc_feature 1..20: note = Synthetic
  source 1..20: mol_type = other DNA
gtcatcttagtcattacctg

SEQ ID NO: 2981 - DNA, 20 bp, synthetic construct
  misc_feature 1..20: note = Synthetic
  source 1..20: mol_type = other DNA
gtcatcttagtcattacctg

SEQ ID NO: 2982 - DNA, 20 bp, synthetic construct
  misc_feature 1..20: note = Synthetic
  source 1..20: mol_type = other DNA
gtcatcttagtcattacctg

SEQ ID NO: 2983 - DNA, 20 bp, synthetic construct
  misc_feature 1..20: note = Synthetic
  source 1..20: mol_type = other DNA
gtcatcttagtcattacctg

SEQ ID NO: 2984 - DNA, 20 bp, synthetic construct
  misc_feature 1..20: note = Synthetic
  source 1..20: mol_type = other DNA
ggcactgcggctggaggtgg

SEQ ID NO: 2985 - DNA, 20 bp, synthetic construct
  misc_feature 1..20: note = Synthetic
  source 1..20: mol_type = other DNA
ggcactgcggctggaggtgg

SEQ ID NO: 2986 - DNA, 20 bp, synthetic construct
  misc_feature 1..20: note = Synthetic
  source 1..20: mol_type = other DNA
ggcactgcggctggaggtgg

SEQ ID NO: 2987 - DNA, 20 bp, synthetic construct
  misc_feature 1..20: note = Synthetic
  source 1..20: mol_type = other DNA
ggcactgcggctggaggtgg

SEQ ID NO: 2988 - DNA, 20 bp, synthetic construct
  misc_feature 1..20: note = Synthetic
  source 1..20: mol_type = other DNA
ggcactgcggctggaggtgg

SEQ ID NO: 2989 - DNA, 20 bp, synthetic construct
  misc_feature 1..20: note = Synthetic
  source 1..20: mol_type = other DNA
ggcactgcggctggaggtgg

SEQ ID NO: 2990 - DNA, 20 bp, synthetic construct
  misc_feature 1..20: note = Synthetic
  source 1..20: mol_type = other DNA
ggcactgcggctggaggtgg

SEQ ID NO: 2991 - DNA, 20 bp, synthetic construct
  misc_feature 1..20: note = Synthetic
  source 1..20: mol_type = other DNA
ggcactgcggctggaggtgg

SEQ ID NO: 2992 - DNA, 20 bp, synthetic construct
  misc_feature 1..20: note = Synthetic
  source 1..20: mol_type = other DNA
ggcactgcggctggaggtgg

SEQ ID NO: 2993 - DNA, 20 bp, synthetic construct
  misc_feature 1..20: note = Synthetic
  source 1..20: mol_type = other DNA
ggcactgcggctggaggtgg

SEQ ID NO: 2994 - DNA, 20 bp, synthetic construct
  misc_feature 1..20: note = Synthetic
  source 1..20: mol_type = other DNA
ggcactgcggctggaggtgg

SEQ ID NO: 2995 - DNA, 20 bp, synthetic construct
  misc_feature 1..20: note = Synthetic
  source 1..20: mol_type = other DNA
ggcactgcggctggaggtgg

SEQ ID NO: 2996 - DNA, 20 bp, synthetic construct
  misc_feature 1..20: note = Synthetic
  source 1..20: mol_type = other DNA
ggcactgcggctggaggtgg

SEQ ID NO: 2997 - DNA, 18 bp, synthetic construct
  misc_feature 1..18: note = Synthetic
  source 1..18: mol_type = other DNA
tctgccatctcgtgctca

SEQ ID NO: 2998 - DNA, 19 bp, synthetic construct
  misc_feature 1..19: note = Synthetic
  source 1..19: mol_type = other DNA
tctgccatctcgtgctcag

SEQ ID NO: 2999 - DNA, 20 bp, synthetic construct
  misc_feature 1..20: note = Synthetic
  source 1..20: mol_type = other DNA
tctgccatctcgtgctcagt

SEQ ID NO: 3000 - DNA, 21 bp, synthetic construct
  misc_feature 1..21: note = Synthetic
  source 1..21: mol_type = other DNA
tctgccatctcgtgctcagtc

SEQ ID NO: 3001 - DNA, 22 bp, synthetic construct
  misc_feature 1..22: note = Synthetic
  source 1..22: mol_type = other DNA
tctgccatctcgtgctcagtct

SEQ ID NO: 3002 - DNA, 23 bp, synthetic construct
  misc_feature 1..23: note = Synthetic
  source 1..23: mol_type = other DNA
tctgccatctcgtgctcagtctg

SEQ ID NO: 3003 - DNA, 24 bp, synthetic construct
  misc_feature 1..24: note = Synthetic
  source 1..24: mol_type = other DNA
tctgccatctcgtgctcagtctgg

SEQ ID NO: 3004 - DNA, 25 bp, synthetic construct
  misc_feature 1..25: note = Synthetic
  source 1..25: mol_type = other DNA
tctgccatctcgtgctcagtctggg

SEQ ID NO: 3005 - DNA, 26 bp, synthetic construct
  misc_feature 1..26: note = Synthetic
  source 1..26: mol_type = other DNA
tctgccatctcgtgctcagtctgggc

SEQ ID NO: 3006 - DNA, 27 bp, synthetic construct
  misc_feature 1..27: note = Synthetic
  source 1..27: mol_type = other DNA
tctgccatctcgtgctcagtctgggcc

SEQ ID NO: 3007 - DNA, 22 bp, synthetic construct
  misc_feature 1..22: note = Synthetic
  source 1..22: mol_type = other DNA
atgggagcacttcttcttctgc

SEQ ID NO: 3008 - DNA, 23 bp, synthetic construct
  misc_feature 1..23: note = Synthetic
  source 1..23: mol_type = other DNA
atgggagcacttcttcttctgct

SEQ ID NO: 3009 - DNA, 24 bp, synthetic construct
  misc_feature 1..24: note = Synthetic
  source 1..24: mol_type = other DNA
atgggagcacttcttcttctgctc

SEQ ID NO: 3010 - DNA, 25 bp, synthetic construct
  misc_feature 1..25: note = Synthetic
  source 1..25: mol_type = other DNA
atgggagcacttcttcttctgctcg

SEQ ID NO: 3011 - DNA, 26 bp, synthetic construct
  misc_feature 1..26: note = Synthetic
  source 1..26: mol_type = other DNA
atgggagcacttcttcttctgctcgg

SEQ ID NO: 3012 - DNA, 27 bp, synthetic construct
  misc_feature 1..27: note = Synthetic
  source 1..27: mol_type = other DNA
atgggagcacttcttcttctgctcgga

SEQ ID NO: 3013 - DNA, 28 bp, synthetic construct
  misc_feature 1..28: note = Synthetic
  source 1..28: mol_type = other DNA
atgggagcacttcttcttctgctcggac

SEQ ID NO: 3014 - DNA, 29 bp, synthetic construct
  misc_feature 1..29: note = Synthetic
  source 1..29: mol_type = other DNA
atgggagcacttcttcttctgctcggact

SEQ ID NO: 3015 - DNA, 30 bp, synthetic construct
  misc_feature 1..30: note = Synthetic
  source 1..30: mol_type = other DNA
atgggagcacttcttcttctgctcggactc

SEQ ID NO: 3016 - DNA, 25 bp, synthetic construct
  misc_feature 1..25: note = Synthetic
  source 1..25: mol_type = other DNA
ggaaaagcgatcaaggtgctgcaga

SEQ ID NO: 3017 - DNA, 26 bp, synthetic construct
  misc_feature 1..26: note = Synthetic
  source 1..26: mol_type = other DNA
ggaaaagcgatcaaggtgctgcagaa

SEQ ID NO: 3018 - DNA, 27 bp, synthetic construct
  misc_feature 1..27: note = Synthetic
  source 1..27: mol_type = other DNA
ggaaaagcgatcaaggtgctgcagaag

SEQ ID NO: 3019 - DNA, 28 bp, synthetic construct
  misc_feature 1..28: note = Synthetic
  source 1..28: mol_type = other DNA
ggaaaagcgatcaaggtgctgcagaagg

SEQ ID NO: 3020 - DNA, 29 bp, synthetic construct
  misc_feature 1..29: note = Synthetic
  source 1..29: mol_type = other DNA
ggaaaagcgatcaaggtgctgcagaaggg

SEQ ID NO: 3021 - DNA, 30 bp, synthetic construct
  misc_feature 1..30: note = Synthetic
  source 1..30: mol_type = other DNA
ggaaaagcgatcaaggtgctgcagaaggga

SEQ ID NO: 3022 - DNA, 31 bp, synthetic construct
  misc_feature 1..31: note = Synthetic
  source 1..31: mol_type = other DNA
ggaaaagcgatcaaggtgctgcagaagggat

SEQ ID NO: 3023 - DNA, 32 bp, synthetic construct
  misc_feature 1..32: note = Synthetic
  source 1..32: mol_type = other DNA
ggaaaagcgatcaaggtgctgcagaagggatt

SEQ ID NO: 3024 - DNA, 33 bp, synthetic construct
  misc_feature 1..33: note = Synthetic
  source 1..33: mol_type = other DNA
ggaaaagcgatcaaggtgctgcagaagggattc

SEQ ID NO: 3025 - DNA, 34 bp, synthetic construct
  misc_feature 1..34: note = Synthetic
  source 1..34: mol_type = other DNA
ggaaaagcgatcaaggtgctgcagaagggattcc

SEQ ID NO: 3026 - DNA, 20 bp, synthetic construct
  misc_feature 1..20: note = Synthetic
  source 1..20: mol_type = other DNA
gaacacctcatgtaatgact

SEQ ID NO: 3027 - DNA, 21 bp, synthetic construct
  misc_feature 1..21: note = Synthetic
  source 1..21: mol_type = other DNA
gaacacctcatgtaatgacta

SEQ ID NO: 3028 - DNA, 22 bp, synthetic construct
  misc_feature 1..22: note = Synthetic
  source 1..22: mol_type = other DNA
gaacacctcatgtaatgactaa

SEQ ID NO: 3029 - DNA, 23 bp, synthetic construct
  misc_feature 1..23: note = Synthetic
  source 1..23: mol_type = other DNA
gaacacctcatgtaatgactaag

SEQ ID NO: 3030 - DNA, 24 bp, synthetic construct
  misc_feature 1..24: note = Synthetic
  source 1..24: mol_type = other DNA
gaacacctcatgtaatgactaaga

SEQ ID NO: 3031 - DNA, 25 bp, synthetic construct
  misc_feature 1..25: note = Synthetic
  source 1..25: mol_type = other DNA
gaacacctcatgtaatgactaagat

SEQ ID NO: 3032 - DNA, 26 bp, synthetic construct
  misc_feature 1..26: note = Synthetic
  source 1..26: mol_type = other DNA
gaacacctcatgtaatgactaagatg

SEQ ID NO: 3033 - DNA, 27 bp, synthetic construct
  misc_feature 1..27: note = Synthetic
  source 1..27: mol_type = other DNA
gaacacctcatgtaatgactaagatga

SEQ ID NO: 3034 - DNA, 28 bp, synthetic construct
  misc_feature 1..28: note = Synthetic
  source 1..28: mol_type = other DNA
gaacacctcatgtaatgactaagatgac

SEQ ID NO: 3035 - DNA, 20 bp, synthetic construct
  misc_feature 1..20: note = Synthetic
  source 1..20: mol_type = other DNA
gctttaaccccaacctccag

SEQ ID NO: 3036 - DNA, 21 bp, synthetic construct
  misc_feature 1..21: note = Synthetic
  source 1..21: mol_type = other DNA
gctttaaccccaacctccagc

SEQ ID NO: 3037 - DNA, 22 bp, synthetic construct
  misc_feature 1..22: note = Synthetic
  source 1..22: mol_type = other DNA
gctttaaccccaacctccagcc

SEQ ID NO: 3038 - DNA, 23 bp, synthetic construct
  misc_feature 1..23: note = Synthetic
  source 1..23: mol_type = other DNA
gctttaaccccaacctccagccg

SEQ ID NO: 3039 - DNA, 24 bp, synthetic construct
  misc_feature 1..24: note = Synthetic
  source 1..24: mol_type = other DNA
gctttaaccccaacctccagccgc

SEQ ID NO: 3040 - DNA, 25 bp, synthetic construct
  misc_feature 1..25: note = Synthetic
  source 1..25: mol_type = other DNA
gctttaaccccaacctccagccgca

SEQ ID NO: 3041 - DNA, 26 bp, synthetic construct
  misc_feature 1..26: note = Synthetic
  source 1..26: mol_type = other DNA
gctttaaccccaacctccagccgcag

SEQ ID NO: 3042 - DNA, 27 bp, synthetic construct
  misc_feature 1..27: note = Synthetic
  source 1..27: mol_type = other DNA
gctttaaccccaacctccagccgcagt

SEQ ID NO: 3043 - DNA, 28 bp, synthetic construct
  misc_feature 1..28: note = Synthetic
  source 1..28: mol_type = other DNA
gctttaaccccaacctccagccgcagtg

SEQ ID NO: 3044 - DNA, 22 bp, synthetic construct
  misc_feature 1..22: note = Synthetic
  source 1..22: mol_type = other DNA
tctgccatccgtgctcagtctg

SEQ ID NO: 3045 - DNA, 24 bp, synthetic construct
  misc_feature 1..24: note = Synthetic
  source 1..24: mol_type = other DNA
tctgccatcatcgtgctcagtctg

SEQ ID NO: 3046 - DNA, 26 bp, synthetic construct
  misc_feature 1..26: note = Synthetic
  source 1..26: mol_type = other DNA
tctgccatcaaagcgtgctcagtctg

SEQ ID NO: 3047 - DNA, 23 bp, synthetic construct
  misc_feature 1..23: note = Synthetic
  source 1..23: mol_type = other DNA
tctgccatctcgtgctcagtctg

SEQ ID NO: 3048 - DNA, 24 bp, synthetic construct
  misc_feature 1..24: note = Synthetic
  source 1..24: mol_type = other DNA
ctctgccatctcgtgctcagtctg

SEQ ID NO: 3049 - DNA, 25 bp, synthetic construct
  misc_feature 1..25: note = Synthetic
  source 1..25: mol_type = other DNA
cctctgccatctcgtgctcagtctg

SEQ ID NO: 3050 - DNA, 26 bp, synthetic construct
  misc_feature 1..26: note = Synthetic
  source 1..26: mol_type = other DNA
tcctctgccatctcgtgctcagtctg

SEQ ID NO: 3051 - DNA, 27 bp, synthetic construct
  misc_feature 1..27: note = Synthetic
  source 1..27: mol_type = other DNA
ttcctctgccatctcgtgctcagtctg

SEQ ID NO: 3052 - DNA, 28 bp, synthetic construct
  misc_feature 1..28: note = Synthetic
  source 1..28: mol_type = other DNA
tttcctctgccatctcgtgctcagtctg

SEQ ID NO: 3053 - DNA, 29 bp, synthetic construct
  misc_feature 1..29: note = Synthetic
  source 1..29: mol_type = other DNA
ctttcctctgccatctcgtgctcagtctg

SEQ ID NO: 3054 - DNA, 30 bp, synthetic construct
  misc_feature 1..30: note = Synthetic
  source 1..30: mol_type = other DNA
cctttcctctgccatctcgtgctcagtctg

SEQ ID NO: 3055 - DNA, 31 bp, synthetic construct
  misc_feature 1..31: note = Synthetic
  source 1..31: mol_type = other DNA
tcctttcctctgccatctcgtgctcagtctg

SEQ ID NO: 3056 - DNA, 32 bp, synthetic construct
  misc_feature 1..32: note = Synthetic
  source 1..32: mol_type = other DNA
ttcctttcctctgccatctcgtgctcagtctg

SEQ ID NO: 3057 - DNA, 33 bp, synthetic construct
  misc_feature 1..33: note = Synthetic
  source 1..33: mol_type = other DNA
cttcctttcctctgccatctcgtgctcagtctg

SEQ ID NO: 3058 - DNA, 23 bp, synthetic construct
  misc_feature 1..23: note = Synthetic
  source 1..23: mol_type = other DNA
ggagcccttgttcttctgctcgg

SEQ ID NO: 3059 - DNA, 24 bp, synthetic construct
  misc_feature 1..24: note = Synthetic
  source 1..24: mol_type = other DNA
gggagcccttgttcttctgctcgg

SEQ ID NO: 3060 - DNA, 25 bp, synthetic construct
  misc_feature 1..25: note = Synthetic
  source 1..25: mol_type = other DNA
tgggagcccttgttcttctgctcgg

SEQ ID NO: 3061 - DNA, 26 bp, synthetic construct
  misc_feature 1..26: note = Synthetic
  source 1..26: mol_type = other DNA
atgggagcccttgttcttctgctcgg

SEQ ID NO: 3062 - DNA, 27 bp, synthetic construct
  misc_feature 1..27: note = Synthetic
  source 1..27: mol_type = other DNA
gatgggagcccttgttcttctgctcgg

SEQ ID NO: 3063 - DNA, 28 bp, synthetic construct
  misc_feature 1..28: note = Synthetic
  source 1..28: mol_type = other DNA
tgatgggagcccttgttcttctgctcgg

SEQ ID NO: 3064 - DNA, 29 bp, synthetic construct
  misc_feature 1..29: note = Synthetic
  source 1..29: mol_type = other DNA
gtgatgggagcccttgttcttctgctcgg

SEQ ID NO: 3065 - DNA, 30 bp, synthetic construct
  misc_feature 1..30: note = Synthetic
  source 1..30: mol_type = other DNA
tgtgatgggagcccttgttcttctgctcgg

SEQ ID NO: 3066 - DNA, 31 bp, synthetic construct
  misc_feature 1..31: note = Synthetic
  source 1..31: mol_type = other DNA
atgtgatgggagcccttgttcttctgctcgg

SEQ ID NO: 3067 - DNA, 32 bp, synthetic construct
  misc_feature 1..32: note = Synthetic
  source 1..32: mol_type = other DNA
gatgtgatgggagcccttgttcttctgctcgg

SEQ ID NO: 3068 - DNA, 33 bp, synthetic construct
  misc_feature 1..33: note = Synthetic
  source 1..33: mol_type = other DNA
tgatgtgatgggagcccttgttcttctgctcgg

SEQ ID NO: 3069 - DNA, 23 bp, synthetic construct
  misc_feature 1..23: note = Synthetic
  source 1..23: mol_type = other DNA
cgatcaaggtgctgcagaaggga

SEQ ID NO: 3070 - DNA, 24 bp, synthetic construct
  misc_feature 1..24: note = Synthetic
  source 1..24: mol_type = other DNA
gcgatcaaggtgctgcagaaggga

SEQ ID NO: 3071 - DNA, 25 bp, synthetic construct
  misc_feature 1..25: note = Synthetic
  source 1..25: mol_type = other DNA
agcgatcaaggtgctgcagaaggga

SEQ ID NO: 3072 - DNA, 26 bp, synthetic construct
  misc_feature 1..26: note = Synthetic
  source 1..26: mol_type = other DNA
aagcgatcaaggtgctgcagaaggga

SEQ ID NO: 3073 - DNA, 27 bp, synthetic construct
  misc_feature 1..27: note = Synthetic
  source 1..27: mol_type = other DNA
aaagcgatcaaggtgctgcagaaggga

SEQ ID NO: 3074 - DNA, 28 bp, synthetic construct
  misc_feature 1..28: note = Synthetic
  source 1..28: mol_type = other DNA
aaaagcgatcaaggtgctgcagaaggga

SEQ ID NO: 3075 - DNA, 29 bp, synthetic construct
  misc_feature 1..29: note = Synthetic
  source 1..29: mol_type = other DNA
gaaaagcgatcaaggtgctgcagaaggga

SEQ ID NO: 3076 - DNA, 30 bp, synthetic construct; identical to SEQ ID NO: 3021
  misc_feature 1..30: note = Synthetic
  source 1..30: mol_type = other DNA

SEQ ID NO: 3077 - DNA, 31 bp, synthetic construct
  misc_feature 1..31: note = Synthetic
  source 1..31: mol_type = other DNA
cggaaaagcgatcaaggtgctgcagaaggga

SEQ ID NO: 3078 - DNA, 32 bp, synthetic construct
  misc_feature 1..32: note = Synthetic
  source 1..32: mol_type = other DNA
tcggaaaagcgatcaaggtgctgcagaaggga

SEQ ID NO: 3079 - DNA, 33 bp, synthetic construct
  misc_feature 1..33: note = Synthetic
  source 1..33: mol_type = other DNA
ctcggaaaagcgatcaaggtgctgcagaaggga

SEQ ID NO: 3080 - DNA, 25 bp, synthetic construct
  misc_feature 1..25: note = Synthetic
  source 1..25: mol_type = other DNA
aacacctcatgtaatgactaagatg

SEQ ID NO: 3081 - DNA, 26 bp, synthetic construct
  misc_feature 1..26: note = Synthetic
  source 1..26: mol_type = other DNA
gaacacctcatgtaatgactaagatg

SEQ ID NO: 3082 - DNA, 27 bp, synthetic construct
  misc_feature 1..27: note = Synthetic
  source 1..27: mol_type = other DNA
cgaacacctcatgtaatgactaagatg

SEQ ID NO: 3083 - DNA, 28 bp, synthetic construct
  misc_feature 1..28: note = Synthetic
  source 1..28: mol_type = other DNA
acgaacacctcatgtaatgactaagatg

SEQ ID NO: 3084 - DNA, 29 bp, synthetic construct
  misc_feature 1..29: note = Synthetic
  source 1..29: mol_type = other DNA
aacgaacacctcatgtaatgactaagatg

SEQ ID NO: 3085 - DNA, 30 bp, synthetic construct
  misc_feature 1..30: note = Synthetic
  source 1..30: mol_type = other DNA
caacgaacacctcatgtaatgactaagatg

SEQ ID NO: 3086 - DNA, 31 bp, synthetic construct
  misc_feature 1..31: note = Synthetic
  source 1..31: mol_type = other DNA
acaacgaacacctcatgtaatgactaagatg

SEQ ID NO: 3087 - DNA, 32 bp, synthetic construct
  misc_feature 1..32: note = Synthetic
  source 1..32: mol_type = other DNA
tacaacgaacacctcatgtaatgactaagatg

SEQ ID NO: 3088 - DNA, 33 bp, synthetic construct
  misc_feature 1..33: note = Synthetic
  source 1..33: mol_type = other DNA
ttacaacgaacacctcatgtaatgactaagatg

SEQ ID NO: 3089 - DNA, 34 bp, synthetic construct
  misc_feature 1..34: note = Synthetic
  source 1..34: mol_type = other DNA
gttacaacgaacacctcatgtaatgactaagatg

SEQ ID NO: 3090 - DNA, 35 bp, synthetic construct
  misc_feature 1..35: note = Synthetic
  source 1..35: mol_type = other DNA
agttacaacgaacacctcatgtaatgactaagatg

SEQ ID NO: 3091 - DNA, 18 bp, synthetic construct
  misc_feature 1..18: note = Synthetic
  source 1..18: mol_type = other DNA
accccaacctccagccgc

SEQ ID NO: 3092 - DNA, 19 bp, synthetic construct
  misc_feature 1..19: note = Synthetic
  source 1..19: mol_type = other DNA
aaccccaacctccagccgc

SEQ ID NO: 3093 - DNA, 20 bp, synthetic construct
  misc_feature 1..20: note = Synthetic
  source 1..20: mol_type = other DNA
taaccccaacctccagccgc

SEQ ID NO: 3094 - DNA, 21 bp, synthetic construct
  misc_feature 1..21: note = Synthetic
  source 1..21: mol_type = other DNA
ttaaccccaacctccagccgc

SEQ ID NO: 3095 - DNA, 22 bp, synthetic construct
  misc_feature 1..22: note = Synthetic
  source 1..22: mol_type = other DNA
tttaaccccaacctccagccgc

SEQ ID NO: 3096 - DNA, 23 bp, synthetic construct
  misc_feature 1..23: note = Synthetic
  source 1..23: mol_type = other DNA
ctttaaccccaacctccagccgc

SEQ ID NO: 3097 - DNA, 24 bp, synthetic construct
  misc_feature 1..24: note = Synthetic
  source 1..24: mol_type = other DNA
gctttaaccccaacctccagccgc

SEQ ID NO: 3098 - DNA, 25 bp, synthetic construct
  misc_feature 1..25: note = Synthetic
  source 1..25: mol_type = other DNA
cgctttaaccccaacctccagccgc

SEQ ID NO: 3099 - DNA, 26 bp, synthetic construct
  misc_feature 1..26: note = Synthetic
  source 1..26: mol_type = other DNA
ccgctttaaccccaacctccagccgc

SEQ ID NO: 3100 - DNA, 27 bp, synthetic construct
  misc_feature 1..27: note = Synthetic
  source 1..27: mol_type = other DNA
tccgctttaaccccaacctccagccgc

SEQ ID NO: 3101 - DNA, 28 bp, synthetic construct
  misc_feature 1..28: note = Synthetic
  source 1..28: mol_type = other DNA
ctccgctttaaccccaacctccagccgc

SEQ ID NO: 3102 - DNA, 28 bp, synthetic construct
  misc_feature 1..28: note = Synthetic
  source 1..28: mol_type = other DNA
ctccgctttaaccccaacctccagccgc

SEQ ID NO: 3103 - DNA, 28 bp, synthetic construct
  misc_feature 1..28: note = Synthetic
  source 1..28: mol_type = other DNA
ctccgctttaaccccaacctccagccgc

SEQ ID NO: 3104 - DNA, 20 bp, synthetic construct
  misc_feature 1..20: note = Synthetic
  source 1..20: mol_type = other DNA
gtcatcttagtcattacctg

SEQ ID NO: 3105 - DNA, 20 bp, synthetic construct
  misc_feature 1..20: note = Synthetic
  source 1..20: mol_type = other DNA
gagtccgagcagaagaagaa

SEQ ID NO: 3106 - DNA, 20 bp, synthetic construct
  misc_feature 1..20: note = Synthetic
  source 1..20: mol_type = other DNA
ggaatcccttctgcagcacc

SEQ ID NO: 3107 - DNA, 20 bp, synthetic construct
  misc_feature 1..20: note = Synthetic
  source 1..20: mol_type = other DNA
ggcccagactgagcacgtga

SEQ ID NO: 3108 - DNA, 20 bp, synthetic construct
  misc_feature 1..20: note = Synthetic
  source 1..20: mol_type = other DNA
ggcactgcggctggaggtgg

SEQ ID NO: 3109 - DNA, 20 bp, synthetic construct
  misc_feature 1..20: note = Synthetic
  source 1..20: mol_type = other DNA
gtcatcttagtcattacctg

SEQ ID NO: 3110 - DNA, 20 bp, synthetic construct
  misc_feature 1..20: note = Synthetic
  source 1..20: mol_type = other DNA
gtcatcttagtcattacctg

SEQ ID NO: 3111 - DNA, 20 bp, synthetic construct
  misc_feature 1..20: note = Synthetic
  source 1..20: mol_type = other DNA
ggaatcccttctgcagcacc

SEQ ID NO: 3112 - DNA, 20 bp, synthetic construct
  misc_feature 1..20: note = Synthetic
  source 1..20: mol_type = other DNA
ggaatcccttctgcagcacc

SEQ ID NO: 3113 - DNA, 29 bp, synthetic construct
  misc_feature 1..29: note = Synthetic
  source 1..29: mol_type = other DNA
aacgaacacctcatgtaatgactaagatg

SEQ ID NO: 3114 - DNA, 28 bp, synthetic construct
  misc_feature 1..28: note = Synthetic
  source 1..28: mol_type = other DNA
atgggagcacttcttcttctgctcggac

SEQ ID NO: 3115 - DNA, 32 bp, synthetic construct; identical to SEQ ID NO: 3023
  misc_feature 1..32: note = Synthetic
  source 1..32: mol_type = other DNA

SEQ ID NO: 3116 - DNA, 23 bp, synthetic construct
  misc_feature 1..23: note = Synthetic
  source 1..23: mol_type = other DNA
tctgccatgacgtgctcagtctg

SEQ ID NO: 3117 - DNA, 19 bp, synthetic construct
  misc_feature 1..19: note = Synthetic
  source 1..19: mol_type = other DNA
ttaaccccaacctccagcc

SEQ ID NO: 3118 - DNA, 29 bp, synthetic construct
  misc_feature 1..29: note = Synthetic
  source 1..29: mol_type = other DNA
aacgaacaccgcaggtaatgactaagatg

SEQ ID NO: 3119 - DNA, 29 bp, synthetic construct
  misc_feature 1..29: note = Synthetic
  source 1..29: mol_type = other DNA
aacgaacaccccaggtaatgactaagatg

SEQ ID NO: 3120 - DNA, 30 bp, synthetic construct; identical to SEQ ID NO: 3021
  misc_feature 1..30: note = Synthetic
  source 1..30: mol_type = other DNA

SEQ ID NO: 3121 - DNA, 31 bp, synthetic construct
  misc_feature 1..31: note = Synthetic
  source 1..31: mol_type = other DNA
ggaaaagcgagccaggtgctgcagaagggat

SEQ ID NO: 3122 - DNA, 21 bp, synthetic construct
  misc_feature 1..21: note = Synthetic
  source 1..21: mol_type = other DNA
gtcaaccattaagcaaaacat

SEQ ID NO: 3123 - DNA, 21 bp, synthetic construct
  misc_feature 1..21: note = Synthetic
  source 1..21: mol_type = other DNA
gtctcaggctgtgcagacaaa

SEQ ID NO: 3124 - DNA, 20 bp, synthetic construct
  misc_feature 1..20: note = Synthetic
  source 1..20: mol_type = other DNA
ggggcacagatgagaaactc

SEQ ID NO: 3125 - DNA, 20 bp, synthetic construct
  misc_feature 1..20: note = Synthetic
  source 1..20: mol_type = other DNA
gccgtttgtactttgtcctc

SEQ ID NO: 3126 - DNA, 20 bp, synthetic construct
  misc_feature 1..20: note = Synthetic
  source 1..20: mol_type = other DNA
gcgccaccggttgatgtgat

SEQ ID NO: 3127 - DNA, 20 bp, synthetic construct
  misc_feature 1..20: note = Synthetic
  source 1..20: mol_type = other DNA
gcttcgtggcaatgcgccac

SEQ ID NO: 3128 - DNA, 20 bp, synthetic construct
  misc_feature 1..20: note = Synthetic
  source 1..20: mol_type = other DNA
gacatcgatgtcctccccat

SEQ ID NO: 3129 - DNA, 21 bp, synthetic construct
  misc_feature 1..21: note = Synthetic
  source 1..21: mol_type = other DNA
gtggttgcccaccctagtcat

SEQ ID NO: 3130 - DNA, 20 bp, synthetic construct
  misc_feature 1..20: note = Synthetic
  source 1..20: mol_type = other DNA
gcgactctctgcgtactgat

SEQ ID NO: 3131 - DNA, 21 bp, synthetic construct
  misc_feature 1..21: note = Synthetic
  source 1..21: mol_type = other DNA
gccctacttccgctttcacct

SEQ ID NO: 3132 - DNA, 20 bp, synthetic construct
  misc_feature 1..20: note = Synthetic
  source 1..20: mol_type = other DNA
ggattccatgaggtgcgcga

SEQ ID NO: 3133 - DNA, 20 bp, synthetic construct
  misc_feature 1..20: note = Synthetic
  source 1..20: mol_type = other DNA
gctgcagaagggattccatg

SEQ ID NO: 3134 - DNA, 20 bp, synthetic construct
  misc_feature 1..20: note = Synthetic
  source 1..20: mol_type = other DNA
gcttgagaccgccagaagct

SEQ ID NO: 3135 - DNA, 20 bp, synthetic construct
  misc_feature 1..20: note = Synthetic
  source 1..20: mol_type = other DNA
ggggtcccaggtgctgacgt

SEQ ID NO: 3136 - DNA, 20 bp, synthetic construct
  misc_feature 1..20: note = Synthetic
  source 1..20: mol_type = other DNA
gcagaaatagactaattgca

SEQ ID NO: 3137 - DNA, 20 bp, synthetic construct
  misc_feature 1..20: note = Synthetic
  source 1..20: mol_type = other DNA
ggattgacccaggccagggc

SEQ ID NO: 3138 - DNA, 20 bp, synthetic construct
  misc_feature 1..20: note = Synthetic
  source 1..20: mol_type = other DNA
gacgccctctggaggaagca

SEQ ID NO: 3139 - DNA, 19 bp, synthetic construct
  misc_feature 1..19: note = Synthetic
  source 1..19: mol_type = other DNA
gctgtcctgcgacgccctc

SEQ ID NO: 3140 - DNA, 20 bp, synthetic construct
  misc_feature 1..20: note = Synthetic
  source 1..20: mol_type = other DNA
gcacatactagcccctgtct

SEQ ID NO: 3141 - DNA, 20 bp, synthetic construct
  misc_feature 1..20: note = Synthetic
  source 1..20: mol_type = other DNA
gtcaaccagtatcccggtgc

SEQ ID NO: 3142 - DNA, 20 bp, synthetic construct
  misc_feature 1..20: note = Synthetic
  source 1..20: mol_type = other DNA
tcccttccttccacccagcc

SEQ ID NO: 3143 - DNA, 20 bp, synthetic construct
  misc_feature 1..20: note = Synthetic
  source 1..20: mol_type = other DNA
ccctgcctgtcatcctgctt

SEQ ID NO: 3144 - DNA, 20 bp, synthetic construct
  misc_feature 1..20: note = Synthetic
  source 1..20: mol_type = other DNA
gcagtgccaccggggcgccg

SEQ ID NO: 3145 - DNA, 20 bp, synthetic construct
  misc_feature 1..20: note = Synthetic
  source 1..20: mol_type = other DNA
gcgggggctcagagagggca

SEQ ID NO: 3146 - DNA, 21 bp, synthetic construct
  misc_feature 1..21: note = Synthetic
  source 1..21: mol_type = other DNA
gagacacacacacaggcctgg

SEQ ID NO: 3147 - DNA, 21 bp, synthetic construct
  misc_feature 1..21: note = Synthetic
  source 1..21: mol_type = other DNA
gtcaaccattaagcaaaacat

SEQ ID NO: 3148 - DNA, 21 bp, synthetic construct
  misc_feature 1..21: note = Synthetic
  source 1..21: mol_type = other DNA
gtgagttacaacgaacaccgc

SEQ ID NO: 3149 - DNA, 21 bp, synthetic construct
  misc_feature 1..21: note = Synthetic
  source 1..21: mol_type = other DNA
gtgagttacaacgaacacccc

SEQ ID NO: 3150 - DNA, 20 bp, synthetic construct
  misc_feature 1..20: note = Synthetic
  source 1..20: mol_type = other DNA
ggggtcccaggtgctgacgt

SEQ ID NO: 3151 - DNA, 20 bp, synthetic construct
  misc_feature 1..20: note = Synthetic
  source 1..20: mol_type = other DNA
gaagctcggaaaagcgatca

SEQ ID NO: 3152 - DNA, 20 bp, synthetic construct
  misc_feature 1..20: note = Synthetic
  source 1..20: mol_type = other DNA
gaagctcggaaaagcgagcc

SEQ ID NO: 3153 - DNA, 20 bp, synthetic construct
  misc_feature 1..20: note = Synthetic
  source 1..20: mol_type = other DNA
gtcaaccagtatcccggtgc

SEQ ID NO: 3154 - DNA, 20 bp, synthetic construct
  misc_feature 1..20: note = Synthetic
  source 1..20: mol_type = other DNA
ggcccagactgagcacgtga

SEQ ID NO: 3155 - DNA, 20 bp, synthetic construct
  misc_feature 1..20: note = Synthetic
  source 1..20: mol_type = other DNA
ggcccagactgagcacgtga

SEQ ID NO: 3156 - DNA, 20 bp, synthetic construct
  misc_feature 1..20: note = Synthetic
  source 1..20: mol_type = other DNA
ggcccagactgagcacgtga

SEQ ID NO: 3157 - DNA, 20 bp, synthetic construct
  misc_feature 1..20: note = Synthetic
  source 1..20: mol_type = other DNA
ggcccagactgagcacgtga

SEQ ID NO: 3158 - DNA, 20 bp, synthetic construct
  misc_feature 1..20: note = Synthetic
  source 1..20: mol_type = other DNA
ggcccagactgagcacgtga

SEQ ID NO: 3159 - DNA, 20 bp, synthetic construct
  misc_feature 1..20: note = Synthetic
  source 1..20: mol_type = other DNA
ggcccagactgagcacgtga

SEQ ID NO: 3160 - DNA, 20 bp, synthetic construct
  misc_feature 1..20: note = Synthetic
  source 1..20: mol_type = other DNA
ggcccagactgagcacgtga

SEQ ID NO: 3161 - DNA, 20 bp, synthetic construct
  misc_feature 1..20: note = Synthetic
  source 1..20: mol_type = other DNA
ggcccagactgagcacgtga

SEQ ID NO: 3162 - DNA, 20 bp, synthetic construct
  misc_feature 1..20: note = Synthetic
  source 1..20: mol_type = other DNA
ggcccagactgagcacgtga

SEQ ID NO: 3163 - DNA, 20 bp, synthetic construct
  misc_feature 1..20: note = Synthetic
  source 1..20: mol_type = other DNA
ggcccagactgagcacgtga

SEQ ID NO: 3164 - DNA, 20 bp, synthetic construct
  misc_feature 1..20: note = Synthetic
  source 1..20: mol_type = other DNA
ggcccagactgagcacgtga

SEQ ID NO: 3165 - DNA, 20 bp, synthetic construct
  misc_feature 1..20: note = Synthetic
  source 1..20: mol_type = other DNA
ggcccagactgagcacgtga

SEQ ID NO: 3166 - DNA, 20 bp, synthetic construct
  misc_feature 1..20: note = Synthetic
  source 1..20: mol_type = other DNA
ggcccagactgagcacgtga

SEQ ID NO: 3167 - DNA, 20 bp, synthetic construct
  misc_feature 1..20: note = Synthetic
  source 1..20: mol_type = other DNA
ggcccagactgagcacgtga

SEQ ID NO: 3168 - DNA, 20 bp, synthetic construct
  misc_feature 1..20: note = Synthetic
  source 1..20: mol_type = other DNA
ggcccagactgagcacgtga

SEQ ID NO: 3169 - DNA, 20 bp, synthetic construct
  misc_feature 1..20: note = Synthetic
  source 1..20: mol_type = other DNA
ggcccagactgagcacgtga

SEQ ID NO: 3170 - DNA, 20 bp, synthetic construct
  misc_feature 1..20: note = Synthetic
  source 1..20: mol_type = other DNA
ggcccagactgagcacgtga

SEQ ID NO: 3171 - DNA, 20 bp, synthetic construct
  misc_feature 1..20: note = Synthetic
  source 1..20: mol_type = other DNA
ggcccagactgagcacgtga

SEQ ID NO: 3172 - DNA, 20 bp, synthetic construct
  misc_feature 1..20: note = Synthetic
  source 1..20: mol_type = other DNA
ggcccagactgagcacgtga

SEQ ID NO: 3173 - DNA, 20 bp, synthetic construct
  misc_feature 1..20: note = Synthetic
  source 1..20: mol_type = other DNA
ggcccagactgagcacgtga

SEQ ID NO: 3174 - DNA, 20 bp, synthetic construct
  misc_feature 1..20: note = Synthetic
  source 1..20: mol_type = other DNA
ggcccagactgagcacgtga

SEQ ID NO: 3175 - DNA, 20 bp, synthetic construct
  misc_feature 1..20: note = Synthetic
  source 1..20: mol_type = other DNA
ggcccagactgagcacgtga

SEQ ID NO: 3176 - DNA, 20 bp, synthetic construct
  misc_feature 1..20: note = Synthetic
  source 1..20: mol_type = other DNA
ggcccagactgagcacgtga

SEQ ID NO: 3177 - DNA, 20 bp, synthetic construct
  misc_feature 1..20: note = Synthetic
  source 1..20: mol_type = other DNA
ggcccagactgagcacgtga

SEQ ID NO: 3178 - DNA, 20 bp, synthetic construct
  misc_feature 1..20: note = Synthetic
  source 1..20: mol_type = other DNA
ggcccagactgagcacgtga

SEQ ID NO: 3179 - DNA, 20 bp, synthetic construct
  misc_feature 1..20: note = Synthetic
  source 1..20: mol_type = other DNA
ggcccagactgagcacgtga

SEQ ID NO: 3180 - DNA, 20 bp, synthetic construct
  misc_feature 1..20: note = Synthetic
  source 1..20: mol_type = other DNA
ggcccagactgagcacgtga

SEQ ID NO: 3181 - DNA, 20 bp, synthetic construct
  misc_feature 1..20: note = Synthetic
  source 1..20: mol_type = other DNA
ggcccagactgagcacgtga

SEQ ID NO: 3182 - DNA, 20 bp, synthetic construct
  misc_feature 1..20: note = Synthetic
  source 1..20: mol_type = other DNA
ggcccagactgagcacgtga

SEQ ID NO: 3183 - DNA, 20 bp, synthetic construct
  misc_feature 1..20: note = Synthetic
  source 1..20: mol_type = other DNA
ggcccagactgagcacgtga

SEQ ID NO: 3184 - DNA, 20 bp, synthetic construct
  misc_feature 1..20: note = Synthetic
  source 1..20: mol_type = other DNA
ggcccagactgagcacgtga

SEQ ID NO: 3185 - DNA, 20 bp, synthetic construct
  misc_feature 1..20: note = Synthetic
  source 1..20: mol_type = other DNA
ggcccagactgagcacgtga

SEQ ID NO: 3186 - DNA, 20 bp, synthetic construct
  misc_feature 1..20: note = Synthetic
  source 1..20: mol_type = other DNA
ggcccagactgagcacgtga

SEQ ID NO: 3187 - DNA, 20 bp, synthetic construct
  misc_feature 1..20: note = Synthetic
  source 1..20: mol_type = other DNA
ggcccagactgagcacgtga

SEQ ID NO: 3188 - DNA, 20 bp, synthetic construct
  misc_feature 1..20: note = Synthetic
  source 1..20: mol_type = other DNA
gtcatcttagtcattacctg

SEQ ID NO: 3189 - DNA, 20 bp, synthetic construct
  misc_feature 1..20: note = Synthetic
  source 1..20: mol_type = other DNA
gtcatcttagtcattacctg

SEQ ID NO: 3190 - DNA, 20 bp, synthetic construct
  misc_feature 1..20: note = Synthetic
  source 1..20: mol_type = other DNA
gtcatcttagtcattacctg

SEQ ID NO: 3191 - DNA, 20 bp, synthetic construct
  misc_feature 1..20: note = Synthetic
  source 1..20: mol_type = other DNA
gtcatcttagtcattacctg

SEQ ID NO: 3192 - DNA, 20 bp, synthetic construct
  misc_feature 1..20: note = Synthetic
  source 1..20: mol_type = other DNA
gtcatcttagtcattacctg

SEQ ID NO: 3193 - DNA, 20 bp, synthetic construct
  misc_feature 1..20: note = Synthetic
  source 1..20: mol_type = other DNA
gtcatcttagtcattacctg

SEQ ID NO: 3194 - DNA, 20 bp, synthetic construct
  misc_feature 1..20: note = Synthetic
  source 1..20: mol_type = other DNA
gtcatcttagtcattacctg

SEQ ID NO: 3195 - DNA, 20 bp, synthetic construct
  misc_feature 1..20: note = Synthetic
  source 1..20: mol_type = other DNA
gtcatcttagtcattacctg

SEQ ID NO: 3196 - DNA, 20 bp, synthetic construct
  misc_feature 1..20: note = Synthetic
  source 1..20: mol_type = other DNA
gtcatcttagtcattacctg

SEQ ID NO: 3197 - DNA, 20 bp, synthetic construct
  misc_feature 1..20: note = Synthetic
  source 1..20: mol_type = other DNA
gtcatcttagtcattacctg

SEQ ID NO: 3198 - DNA, 20 bp, synthetic construct
  misc_feature 1..20: note = Synthetic
  source 1..20: mol_type = other DNA
gtcatcttagtcattacctg

SEQ ID NO: 3199 - DNA, 20 bp, synthetic construct
  misc_feature 1..20: note = Synthetic
  source 1..20: mol_type = other DNA
gtcatcttagtcattacctg

SEQ ID NO: 3200 - DNA, 20 bp, synthetic construct
  misc_feature 1..20: note = Synthetic
  source 1..20: mol_type = other DNA
ggaatcccttctgcagcacc

SEQ ID NO: 3201 - DNA, 20 bp, synthetic construct
  misc_feature 1..20: note = Synthetic
  source 1..20: mol_type = other DNA
ggaatcccttctgcagcacc

SEQ ID NO: 3202 - DNA, 20 bp, synthetic construct
  misc_feature 1..20: note = Synthetic
  source 1..20: mol_type = other DNA
ggaatcccttctgcagcacc

SEQ ID NO: 3203 - DNA, 20 bp, synthetic construct
  misc_feature 1..20: note = Synthetic
  source 1..20: mol_type = other DNA
ggaatcccttctgcagcacc

SEQ ID NO: 3204 - DNA, 20 bp, synthetic construct
  misc_feature 1..20: note = Synthetic
  source 1..20: mol_type = other DNA
ggaatcccttctgcagcacc

SEQ ID NO: 3205 - DNA, 20 bp, synthetic construct
  misc_feature 1..20: note = Synthetic
  source 1..20: mol_type = other DNA
ggaatcccttctgcagcacc

SEQ ID NO: 3206 - DNA, 20 bp, synthetic construct
  misc_feature 1..20: note = Synthetic
  source 1..20: mol_type = other DNA
ggaatcccttctgcagcacc

SEQ ID NO: 3207 - DNA, 20 bp, synthetic construct
  misc_feature 1..20: note = Synthetic
  source 1..20: mol_type = other DNA
ggaatcccttctgcagcacc

SEQ ID NO: 3208 - DNA, 20 bp, synthetic construct
  misc_feature 1..20: note = Synthetic
  source 1..20: mol_type = other DNA
ggaatcccttctgcagcacc

SEQ ID NO: 3209 - DNA, 20 bp, synthetic construct
  misc_feature 1..20: note = Synthetic
  source 1..20: mol_type = other DNA
ggaatcccttctgcagcacc

SEQ ID NO: 3210 - DNA, 20 bp, synthetic construct
  misc_feature 1..20: note = Synthetic
  source 1..20: mol_type = other DNA
ggaatcccttctgcagcacc

SEQ ID NO: 3211 - DNA, 20 bp, synthetic construct
  misc_feature 1..20: note = Synthetic
  source 1..20: mol_type = other DNA
ggaatcccttctgcagcacc

SEQ ID NO: 3212 - DNA, 20 bp, synthetic construct
  misc_feature 1..20: note = Synthetic
  source 1..20: mol_type = other DNA
gagtccgagcagaagaagaa

SEQ ID NO: 3213 - DNA, 20 bp, synthetic construct
  misc_feature 1..20: note = Synthetic
  source 1..20: mol_type = other DNA
gagtccgagcagaagaagaa

SEQ ID NO: 3214 - DNA, 20 bp, synthetic construct
  misc_feature 1..20: note = Synthetic
  source 1..20: mol_type = other DNA
gagtccgagcagaagaagaa

SEQ ID NO: 3215 - DNA, 20 bp, synthetic construct
  misc_feature 1..20: note = Synthetic
  source 1..20: mol_type = other DNA
gagtccgagcagaagaagaa

SEQ ID NO: 3216 - DNA, 20 bp, synthetic construct
  misc_feature 1..20: note = Synthetic
  source 1..20: mol_type = other DNA
gagtccgagcagaagaagaa

SEQ ID NO: 3217 - DNA, 20 bp, synthetic construct
  misc_feature 1..20: note = Synthetic
  source 1..20: mol_type = other DNA
gagtccgagcagaagaagaa

SEQ ID NO: 3218 - DNA, 20 bp, synthetic construct
  misc_feature 1..20: note = Synthetic
  source 1..20: mol_type = other DNA
gagtccgagcagaagaagaa

SEQ ID NO: 3219 - DNA, 20 bp, synthetic construct
  misc_feature 1..20: note = Synthetic
  source 1..20: mol_type = other DNA
gagtccgagcagaagaagaa

SEQ ID NO: 3220 - DNA, 20 bp, synthetic construct
  misc_feature 1..20: note = Synthetic
  source 1..20: mol_type = other DNA
gagtccgagcagaagaagaa

SEQ ID NO: 3221 - DNA, 20 bp, synthetic construct
  misc_feature 1..20: note = Synthetic
  source 1..20: mol_type = other DNA
gagtccgagcagaagaagaa

SEQ ID NO: 3222 - DNA, 20 bp, synthetic construct
  misc_feature 1..20: note = Synthetic
  source 1..20: mol_type = other DNA
gagtccgagcagaagaagaa

SEQ ID NO: 3223 - DNA, 20 bp, synthetic construct
  misc_feature 1..20: note = Synthetic
  source 1..20: mol_type = other DNA
gagtccgagcagaagaagaa

SEQ ID NO: 3224 - DNA, 20 bp, synthetic construct
  misc_feature 1..20: note = Synthetic
  source 1..20: mol_type = other DNA
gcattttcaggaggaagcga

SEQ ID NO: 3225 - DNA, 20 bp, synthetic construct
  misc_feature 1..20: note = Synthetic
  source 1..20: mol_type = other DNA
gcattttcaggaggaagcga

SEQ ID NO: 3226 - DNA, 20 bp, synthetic construct
  misc_feature 1..20: note = Synthetic
  source 1..20: mol_type = other DNA
gcattttcaggaggaagcga

SEQ ID NO: 3227 - DNA, 20 bp, synthetic construct
  misc_feature 1..20: note = Synthetic
  source 1..20: mol_type = other DNA
gcattttcaggaggaagcga

SEQ ID NO: 3228 - DNA, 20 bp, synthetic construct
  misc_feature 1..20: note = Synthetic
  source 1..20: mol_type = other DNA
gcattttcaggaggaagcga

SEQ ID NO: 3229 - DNA, 20 bp, synthetic construct
  misc_feature 1..20: note = Synthetic
  source 1..20: mol_type = other DNA
gcattttcaggaggaagcga

SEQ ID NO: 3230 - DNA, 20 bp, synthetic construct
  misc_feature 1..20: note = Synthetic
  source 1..20: mol_type = other DNA
gcattttcaggaggaagcga

SEQ ID NO: 3231 - DNA, 20 bp, synthetic construct
  misc_feature 1..20: note = Synthetic
  source 1..20: mol_type = other DNA
gcattttcaggaggaagcga

SEQ ID NO: 3232 - DNA, 20 bp, synthetic construct
  misc_feature 1..20: note = Synthetic
  source 1..20: mol_type = other DNA
gcattttcaggaggaagcga

SEQ ID NO: 3233 - DNA, 20 bp, synthetic construct
  misc_feature 1..20: note = Synthetic
  source 1..20: mol_type = other DNA
gcattttcaggaggaagcga

SEQ ID NO: 3234 - DNA, 20 bp, synthetic construct
  misc_feature 1..20: note = Synthetic
  source 1..20: mol_type = other DNA
gcattttcaggaggaagcga

SEQ ID NO: 3235 - DNA, 20 bp, synthetic construct
  misc_feature 1..20: note = Synthetic
  source 1..20: mol_type = other DNA
gcattttcaggaggaagcga

SEQ ID NO: 3236 - DNA, 20 bp, synthetic construct
  misc_feature 1..20: note = Synthetic
  source 1..20: mol_type = other DNA
gatgtctgcaggccagatga

SEQ ID NO: 3237 - DNA, 20 bp, synthetic construct
  misc_feature 1..20: note = Synthetic
  source 1..20: mol_type = other DNA
gatgtctgcaggccagatga

SEQ ID NO: 3238 - DNA, 20 bp, synthetic construct
  misc_feature 1..20: note = Synthetic
  source 1..20: mol_type = other DNA
gatgtctgcaggccagatga

SEQ ID NO: 3239 - DNA, 20 bp, synthetic construct
  misc_feature 1..20: note = Synthetic
  source 1..20: mol_type = other DNA
gatgtctgcaggccagatga

SEQ ID NO: 3240 - DNA, 20 bp, synthetic construct
  misc_feature 1..20: note = Synthetic
  source 1..20: mol_type = other DNA
gatgtctgcaggccagatga

SEQ ID NO: 3241 - DNA, 20 bp, synthetic construct
  misc_feature 1..20: note = Synthetic
  source 1..20: mol_type = other DNA
gatgtctgcaggccagatga

SEQ ID NO: 3242 - DNA, 20 bp, synthetic construct
  misc_feature 1..20: note = Synthetic
  source 1..20: mol_type = other DNA
gatgtctgcaggccagatga

SEQ ID NO: 3243 - DNA, 20 bp, synthetic construct
  misc_feature 1..20: note = Synthetic
  source 1..20: mol_type = other DNA
gatgtctgcaggccagatga

SEQ ID NO: 3244 - DNA, 20 bp, synthetic construct
  misc_feature 1..20: note = Synthetic
  source 1..20: mol_type = other DNA
gatgtctgcaggccagatga

SEQ ID NO: 3245 - DNA, 20 bp, synthetic construct
  misc_feature 1..20: note = Synthetic
  source 1..20: mol_type = other DNA
gatgtctgcaggccagatga

SEQ ID NO: 3246 - DNA, 20 bp, synthetic construct
  misc_feature 1..20: note = Synthetic
  source 1..20: mol_type = other DNA
gatgtctgcaggccagatga

SEQ ID NO: 3247 - DNA, 20 bp, synthetic construct
  misc_feature 1..20: note = Synthetic
  source 1..20: mol_type = other DNA
gatgtctgcaggccagatga

SEQ ID NO: 3248 - DNA, 20 bp, synthetic construct
  misc_feature 1..20: note = Synthetic
  source 1..20: mol_type = other DNA
gattcctggtgccagaaaca

SEQ ID NO: 3249 - DNA, 20 bp, synthetic construct
  misc_feature 1..20: note = Synthetic
  source 1..20: mol_type = other DNA
gattcctggtgccagaaaca

SEQ ID NO: 3250 - DNA, 20 bp, synthetic construct
  misc_feature 1..20: note = Synthetic
  source 1..20: mol_type = other DNA
gattcctggtgccagaaaca

SEQ ID NO: 3251 - DNA, 20 bp, synthetic construct
  misc_feature 1..20: note = Synthetic
  source 1..20: mol_type = other DNA
gattcctggtgccagaaaca

SEQ ID NO: 3252 - DNA, 20 bp, synthetic construct
  misc_feature 1..20: note = Synthetic
  source 1..20: mol_type = other DNA
gattcctggtgccagaaaca

SEQ ID NO: 3253 - DNA, 20 bp, synthetic construct
  misc_feature 1..20: note = Synthetic
  source 1..20: mol_type = other DNA
gattcctggtgccagaaaca

SEQ ID NO: 3254 - DNA, 20 bp, synthetic construct
  misc_feature 1..20: note = Synthetic
  source 1..20: mol_type = other DNA
gattcctggtgccagaaaca

SEQ ID NO: 3255 - DNA, 20 bp, synthetic construct
  misc_feature 1..20: note = Synthetic
  source 1..20: mol_type = other DNA
gattcctggtgccagaaaca

SEQ ID NO: 3256 - DNA, 20 bp, synthetic construct
  misc_feature 1..20: note = Synthetic
  source 1..20: mol_type = other DNA
gattcctggtgccagaaaca

SEQ ID NO: 3257 - DNA, 20 bp, synthetic construct
  misc_feature 1..20: note = Synthetic
  source 1..20: mol_type = other DNA
gattcctggtgccagaaaca

SEQ ID NO: 3258 - DNA, 20 bp, synthetic construct
  misc_feature 1..20: note = Synthetic
  source 1..20: mol_type = other DNA
gattcctggtgccagaaaca

SEQ ID NO: 3259 - DNA, 20 bp, synthetic construct
  misc_feature 1..20: note = Synthetic
  source 1..20: mol_type = other DNA
gattcctggtgccagaaaca

SEQ ID NO: 3260 - DNA, 20 bp, synthetic construct
  misc_feature 1..20: note = Synthetic
  source 1..20: mol_type = other DNA
ggcccagactgagcacgtga

SEQ ID NO: 3261 - DNA, 20 bp, synthetic construct
  misc_feature 1..20: note = Synthetic
  source 1..20: mol_type = other DNA
ggcccagactgagcacgtga

SEQ ID NO: 3262 - DNA, 20 bp, synthetic construct
  misc_feature 1..20: note = Synthetic
  source 1..20: mol_type = other DNA
ggcccagactgagcacgtga

SEQ ID NO: 3263 - DNA, 20 bp, synthetic construct
  misc_feature 1..20: note = Synthetic
  source 1..20: mol_type = other DNA
ggcccagactgagcacgtga

SEQ ID NO: 3264 - DNA, 20 bp, synthetic construct
  misc_feature 1..20: note = Synthetic
  source 1..20: mol_type = other DNA
ggcccagactgagcacgtga

SEQ ID NO: 3265 - DNA, 20 bp, synthetic construct
  misc_feature 1..20: note = Synthetic
  source 1..20: mol_type = other DNA
ggcccagactgagcacgtga

SEQ ID NO: 3266 - DNA, 20 bp, synthetic construct
  misc_feature 1..20: note = Synthetic
  source 1..20: mol_type = other DNA
ggcccagactgagcacgtga

SEQ ID NO: 3267 - DNA, 20 bp, synthetic construct
  misc_feature 1..20: note = Synthetic
  source 1..20: mol_type = other DNA
ggcccagactgagcacgtga

SEQ ID NO: 3268 - DNA, 20 bp, synthetic construct
  misc_feature 1..20: note = Synthetic
  source 1..20: mol_type = other DNA
ggcccagactgagcacgtga

SEQ ID NO: 3269 - DNA, 20 bp, synthetic construct
  misc_feature 1..20: note = Synthetic
  source 1..20: mol_type = other DNA
ggcccagactgagcacgtga

SEQ ID NO: 3270 - DNA, 20 bp, synthetic construct
  misc_feature 1..20: note = Synthetic
  source 1..20: mol_type = other DNA
gtcatcttagtcattacctg

SEQ ID NO: 3271 - DNA, 20 bp, synthetic construct
  misc_feature 1..20: note = Synthetic
  source 1..20: mol_type = other DNA
gtcatcttagtcattacctg

SEQ ID NO: 3272 - DNA, 20 bp, synthetic construct
  misc_feature 1..20: note = Synthetic
  source 1..20: mol_type = other DNA
gtcatcttagtcattacctg

SEQ ID NO: 3273 - DNA, 20 bp, synthetic construct
  misc_feature 1..20: note = Synthetic
  source 1..20: mol_type = other DNA
gtcatcttagtcattacctg

SEQ ID NO: 3274 - DNA, 20 bp, synthetic construct
  misc_feature 1..20: note = Synthetic
  source 1..20: mol_type = other DNA
ggaatcccttctgcagcacc

SEQ ID NO: 3275 - DNA, 20 bp, synthetic construct
  misc_feature 1..20: note = Synthetic
  source 1..20: mol_type = other DNA
ggaatcccttctgcagcacc

SEQ ID NO: 3276 - DNA, 20 bp, synthetic construct
  misc_feature 1..20: note = Synthetic
  source 1..20: mol_type = other DNA
ggaatcccttctgcagcacc

SEQ ID NO: 3277 - DNA, 20 bp, synthetic construct
  misc_feature 1..20: note = Synthetic
  source 1..20: mol_type = other DNA
ggaatcccttctgcagcacc

SEQ ID NO: 3278 - DNA, 20 bp, synthetic construct
  misc_feature 1..20: note = Synthetic
  source 1..20: mol_type = other DNA
gagtccgagcagaagaagaa

SEQ ID NO: 3279 - DNA, 20 bp, synthetic construct
  misc_feature 1..20: note = Synthetic
  source 1..20: mol_type = other DNA
gagtccgagcagaagaagaa

SEQ ID NO: 3280 - DNA, 20 bp, synthetic construct
  misc_feature 1..20: note = Synthetic
  source 1..20: mol_type = other DNA
gagtccgagcagaagaagaa

SEQ ID NO: 3281 - DNA, 20 bp, synthetic construct
  misc_feature 1..20: note = Synthetic
  source 1..20: mol_type = other DNA
gagtccgagcagaagaagaa

SEQ ID NO: 3282 - DNA, 20 bp, synthetic construct
  misc_feature 1..20: note = Synthetic
  source 1..20: mol_type = other DNA
gcattttcaggaggaagcga

SEQ ID NO: 3283 - DNA, 20 bp, synthetic construct
  misc_feature 1..20: note = Synthetic
  source 1..20: mol_type = other DNA
gcattttcaggaggaagcga

SEQ ID NO: 3284 - DNA, 20 bp, synthetic construct
  misc_feature 1..20: note = Synthetic
  source 1..20: mol_type = other DNA
gcattttcaggaggaagcga

SEQ ID NO: 3285 - DNA, 20 bp, synthetic construct
  misc_feature 1..20: note = Synthetic
  source 1..20: mol_type = other DNA
gcattttcaggaggaagcga

SEQ ID NO: 3286 - DNA, 20 bp, synthetic construct
  misc_feature 1..20: note = Synthetic
  source 1..20: mol_type = other DNA
gatgtctgcaggccagatga

SEQ ID NO: 3287 - DNA, 20 bp, synthetic construct
  misc_feature 1..20: note = Synthetic
  source 1..20: mol_type = other DNA
gatgtctgcaggccagatga

SEQ ID NO: 3288 - DNA, 20 bp, synthetic construct
  misc_feature 1..20: note = Synthetic
  source 1..20: mol_type = other DNA
gatgtctgcaggccagatga

SEQ ID NO: 3289 - DNA, 20 bp, synthetic construct
  misc_feature 1..20: note = Synthetic
  source 1..20: mol_type = other DNA
gatgtctgcaggccagatga

SEQ ID NO: 3290 - DNA, 20 bp, synthetic construct
  misc_feature 1..20: note = Synthetic
  source 1..20: mol_type = other DNA
gattcctggtgccagaaaca

SEQ ID NO: 3291 - DNA, 20 bp, synthetic construct
  misc_feature 1..20: note = Synthetic
  source 1..20: mol_type = other DNA
gattcctggtgccagaaaca

SEQ ID NO: 3292 - DNA, 20 bp, synthetic construct
  misc_feature 1..20: note = Synthetic
  source 1..20: mol_type = other DNA
gattcctggtgccagaaaca

SEQ ID NO: 3293 - DNA, 20 bp, synthetic construct
  misc_feature 1..20: note = Synthetic
  source 1..20: mol_type = other DNA
gattcctggtgccagaaaca

SEQ ID NO: 3294 - DNA, 20 bp, synthetic construct
  misc_feature 1..20: note = Synthetic
  source 1..20: mol_type = other DNA
ggcccagactgagcacgtga

SEQ ID NO: 3295 - DNA, 20 bp, synthetic construct
  misc_feature 1..20: note = Synthetic
  source 1..20: mol_type = other DNA
ggcccagactgagcacgtga

SEQ ID NO: 3296 - DNA, 20 bp, synthetic construct
  misc_feature 1..20: note = Synthetic
  source 1..20: mol_type = other DNA
ggcccagactgagcacgtga

SEQ ID NO: 3297 - DNA, 20 bp, synthetic construct
  misc_feature 1..20: note = Synthetic
  source 1..20: mol_type = other DNA
ggcccagactgagcacgtga

SEQ ID NO: 3298 - DNA, 20 bp, synthetic construct
  misc_feature 1..20: note = Synthetic
  source 1..20: mol_type = other DNA
gtcatcttagtcattacctg

SEQ ID NO: 3299 - DNA, 20 bp, synthetic construct
  misc_feature 1..20: note = Synthetic
  source 1..20: mol_type = other DNA
gtcatcttagtcattacctg

SEQ ID NO: 3300 - DNA, 20 bp, synthetic construct
  misc_feature 1..20: note = Synthetic
  source 1..20: mol_type = other DNA
gtcatcttagtcattacctg

SEQ ID NO: 3301 - DNA, 20 bp, synthetic construct
  misc_feature 1..20: note = Synthetic
  source 1..20: mol_type = other DNA
gtcatcttagtcattacctg

SEQ ID NO: 3302 - DNA, 20 bp, synthetic construct
  misc_feature 1..20: note = Synthetic
  source 1..20: mol_type = other DNA
ggaatcccttctgcagcacc

SEQ ID NO: 3303 - DNA, 20 bp, synthetic construct
  misc_feature 1..20: note = Synthetic
  source 1..20: mol_type = other DNA
ggaatcccttctgcagcacc

SEQ ID NO: 3304 - DNA, 20 bp, synthetic construct
  misc_feature 1..20: note = Synthetic
  source 1..20: mol_type = other DNA
ggaatcccttctgcagcacc

SEQ ID NO: 3305 - DNA, 23 bp, synthetic construct
  misc_feature 1..23: note = Synthetic
  source 1..23: mol_type = other DNA
tctgccatctcgtgctcagtctg

SEQ ID NO: 3306 - DNA, 23 bp, synthetic construct
  misc_feature 1..23: note = Synthetic
  source 1..23: mol_type = other DNA
tctgccatcgcgtgctcagtctg

SEQ ID NO: 3307 - DNA, 23 bp, synthetic construct
  misc_feature 1..23: note = Synthetic
  source 1..23: mol_type = other DNA
tctgccatcccgtgctcagtctg

SEQ ID NO: 3308 - DNA, 23 bp, synthetic construct
  misc_feature 1..23: note = Synthetic
  source 1..23: mol_type = other DNA
tctgccattacgtgctcagtctg

SEQ ID NO: 3309 - DNA, 23 bp, synthetic construct
  misc_feature 1..23: note = Synthetic
  source 1..23: mol_type = other DNA
tctgccatgacgtgctcagtctg

SEQ ID NO: 3310 - DNA, 23 bp, synthetic construct
  misc_feature 1..23: note = Synthetic
  source 1..23: mol_type = other DNA
tctgccataacgtgctcagtctg

SEQ ID NO: 3311 - DNA, 23 bp, synthetic construct
  misc_feature 1..23: note = Synthetic
  source 1..23: mol_type = other DNA
tctgccagcacgtgctcagtctg

SEQ ID NO: 3312 - DNA, 23 bp, synthetic construct
  misc_feature 1..23: note = Synthetic
  source 1..23: mol_type = other DNA
tctgccaccacgtgctcagtctg

SEQ ID NO: 3313 - DNA, 23 bp, synthetic construct
  misc_feature 1..23: note = Synthetic
  source 1..23: mol_type = other DNA
tctgccaacacgtgctcagtctg

SEQ ID NO: 3314 - DNA, 23 bp, synthetic construct
  misc_feature 1..23: note = Synthetic
  source 1..23: mol_type = other DNA
tctgccttcacgtgctcagtctg

SEQ ID NO: 3315 - DNA, 23 bp, synthetic construct
  misc_feature 1..23: note = Synthetic
  source 1..23: mol_type = other DNA
tctgccgtcacgtgctcagtctg

SEQ ID NO: 3316 - DNA, 23 bp, synthetic construct
  misc_feature 1..23: note = Synthetic
  source 1..23: mol_type = other DNA
tctgccctcacgtgctcagtctg

SEQ ID NO: 3317 - DNA, 23 bp, synthetic construct
  misc_feature 1..23: note = Synthetic
  source 1..23: mol_type = other DNA
tctgctatcacgtgctcagtctg

SEQ ID NO: 3318 - DNA, 23 bp, synthetic construct
  misc_feature 1..23: note = Synthetic
  source 1..23: mol_type = other DNA
tctgcgatcacgtgctcagtctg

SEQ ID NO: 3319 - DNA, 23 bp, synthetic construct
  misc_feature 1..23: note = Synthetic
  source 1..23: mol_type = other DNA
tctgcaatcacgtgctcagtctg

SEQ ID NO: 3320 - DNA, 23 bp, synthetic construct
  misc_feature 1..23: note = Synthetic
  source 1..23: mol_type = other DNA
tctgtcatcacgtgctcagtctg

SEQ ID NO: 3321 - DNA, 23 bp, synthetic construct
  misc_feature 1..23: note = Synthetic
  source 1..23: mol_type = other DNA
tctggcatcacgtgctcagtctg

SEQ ID NO: 3322 - DNA, 23 bp, synthetic construct
  misc_feature 1..23: note = Synthetic
  source 1..23: mol_type = other DNA
tctgacatcacgtgctcagtctg

SEQ ID NO: 3323 - DNA, 23 bp, synthetic construct
  misc_feature 1..23: note = Synthetic
  source 1..23: mol_type = other DNA
tcttccatcacgtgctcagtctg

SEQ ID NO: 3324 - DNA, 23 bp, synthetic construct
  misc_feature 1..23: note = Synthetic
  source 1..23: mol_type = other DNA
tctcccatcacgtgctcagtctg

SEQ ID NO: 3325 - DNA, 23 bp, synthetic construct
  misc_feature 1..23: note = Synthetic
  source 1..23: mol_type = other DNA
tctaccatcacgtgctcagtctg

SEQ ID NO: 3326 - DNA, 23 bp, synthetic construct
  misc_feature 1..23: note = Synthetic
  source 1..23: mol_type = other DNA
tcggccatcacgtgctcagtctg

SEQ ID NO: 3327 - DNA, 23 bp, synthetic construct
  misc_feature 1..23: note = Synthetic
  source 1..23: mol_type = other DNA
tccgccatcacgtgctcagtctg

SEQ ID NO: 3328 - DNA, 23 bp, synthetic construct
  misc_feature 1..23: note = Synthetic
  source 1..23: mol_type = other DNA
tcagccatcacgtgctcagtctg

SEQ ID NO: 3329 - DNA, 47 bp, synthetic construct
  misc_feature 1..47: note = Synthetic
  source 1..47: mol_type = other DNA
tggaggaagcagggcttcctttcctctgccatctcgtgctcagtctg

SEQ ID NO: 3330 - DNA, 47 bp, synthetic construct
  misc_feature 1..47: note = Synthetic
  source 1..47: mol_type = other DNA
tggaggaagcagggcttcctttgctctgccatcacgtgctcagtctg

SEQ ID NO: 3331 - DNA, 47 bp, synthetic construct
  misc_feature 1..47: note = Synthetic
  source 1..47: mol_type = other DNA
tggaggaagcagggcttcctatcctctgccatcacgtgctcagtctg

SEQ ID NO: 3332 - DNA, 47 bp, synthetic construct
  misc_feature 1..47: note = Synthetic
  source 1..47: mol_type = other DNA
tggaggaagcagggcttgctttcctctgccatcacgtgctcagtctg

SEQ ID NO: 3333 - DNA, 47 bp, synthetic construct
  misc_feature 1..47: note = Synthetic
  source 1..47: mol_type = other DNA
tggaggaagcaggggttcctttcctctgccatcacgtgctcagtctg

SEQ ID NO: 3334 - DNA, 47 bp, synthetic construct
  misc_feature 1..47: note = Synthetic
  source 1..47: mol_type = other DNA
tggaggaagcacggcttcctttcctctgccatcacgtgctcagtctg

SEQ ID NO: 3335 - DNA, 47 bp, synthetic construct
  misc_feature 1..47: note = Synthetic
  source 1..47: mol_type = other DNA
tggaggaagctgggcttcctttcctctgccatcacgtgctcagtctg

SEQ ID NO: 3336 - DNA, 47 bp, synthetic construct
  misc_feature 1..47: note = Synthetic
  source 1..47: mol_type = other DNA
tggaggaaccagggcttcctttcctctgccatcacgtgctcagtctg

SEQ ID NO: 3337 - DNA, 47 bp, synthetic construct
  misc_feature 1..47: note = Synthetic
  source 1..47: mol_type = other DNA
tggacgaagcagggcttcctttcctctgccatcacgtgctcagtctg

SEQ ID NO: 3338 - DNA, 47 bp, synthetic construct
  misc_feature 1..47: note = Synthetic
  source 1..47: mol_type = other DNA
tcgaggaagcagggcttcctttcctctgccatcacgtgctcagtctg

SEQ ID NO: 3339 - DNA, 29 bp, synthetic construct
  misc_feature 1..29: note = Synthetic
  source 1..29: mol_type = other DNA
aacgaacacctcatgtaatgactaagatg

SEQ ID NO: 3340 - DNA, 29 bp, synthetic construct
  misc_feature 1..29: note = Synthetic
  source 1..29: mol_type = other DNA
aacgaacacctcacgtaatgactaagatg

SEQ ID NO: 3341 - DNA, 29 bp, synthetic construct
  misc_feature 1..29: note = Synthetic
  source 1..29: mol_type = other DNA
aacgaacacctcaagtaatgactaagatg

SEQ ID NO: 3342 - DNA, 29 bp, synthetic construct
  misc_feature 1..29: note = Synthetic
  source 1..29: mol_type = other DNA
aacgaacacctctggtaatgactaagatg

SEQ ID NO: 3343 - DNA, 29 bp, synthetic construct
  misc_feature 1..29: note = Synthetic
  source 1..29: mol_type = other DNA
aacgaacacctccggtaatgactaagatg

SEQ ID NO: 3344 - DNA, 29 bp, synthetic construct
  misc_feature 1..29: note = Synthetic
  source 1..29: mol_type = other DNA
aacgaacacctgaggtaatgactaagatg

SEQ ID NO: 3345 - DNA, 29 bp, synthetic construct
  misc_feature 1..29: note = Synthetic
  source 1..29: mol_type = other DNA
aacgaacaccgcaggtaatgactaagatg

SEQ ID NO: 3346 - DNA, 29 bp, synthetic construct
  misc_feature 1..29: note = Synthetic
  source 1..29: mol_type = other DNA
aacgaacaccacaggtaatgactaagatg

SEQ ID NO: 3347 - DNA, 29 bp, synthetic construct
  misc_feature 1..29: note = Synthetic
  source 1..29: mol_type = other DNA
aacgaacaccccaggtaatgactaagatg

SEQ ID NO: 3348 - DNA, 29 bp, synthetic construct
  misc_feature 1..29: note = Synthetic
  source 1..29: mol_type = other DNA
aacgaacacatcaggtaatgactaagatg

SEQ ID NO: 3349 - DNA, 29 bp, synthetic construct
  misc_feature 1..29: note = Synthetic
  source 1..29: mol_type = other DNA
aacgaacatctcaggtaatgactaagatg

SEQ ID NO: 3350 - DNA, 29 bp, synthetic construct
  misc_feature 1..29: note = Synthetic
  source 1..29: mol_type = other DNA
aacgaacgcctcaggtaatgactaagatg

SEQ ID NO: 3351 - DNA, 31 bp, synthetic construct; identical to SEQ ID NO: 691
  misc_feature 1..31: note = Synthetic
  source 1..31: mol_type = other DNA

SEQ ID NO: 3352 - DNA, 31 bp, synthetic construct
  misc_feature 1..31: note = Synthetic
  source 1..31: mol_type = other DNA
ggaaaagcgatccaggagctgcagaagggat

SEQ ID NO: 3353 - DNA, 31 bp, synthetic construct
  misc_feature 1..31: note = Synthetic
  source 1..31: mol_type = other DNA
ggaaaagcgatccagttgctgcagaagggat

SEQ ID NO: 3354 - DNA, 31 bp, synthetic construct
  misc_feature 1..31: note = Synthetic
  source 1..31: mol_type = other DNA
ggaaaagcgatccacgtgctgcagaagggat

SEQ ID NO: 3355 - DNA, 31 bp, synthetic construct
  misc_feature 1..31: note = Synthetic
  source 1..31: mol_type = other DNA
ggaaaagcgatccaagtgctgcagaagggat

SEQ ID NO: 3356 - DNA, 31 bp, synthetic construct
  misc_feature 1..31: note = Synthetic
  source 1..31: mol_type = other DNA
ggaaaagcgatcctggtgctgcagaagggat

SEQ ID NO: 3357 - DNA, 31 bp, synthetic construct
  misc_feature 1..31: note = Synthetic
  source 1..31: mol_type = other DNA
ggaaaagcgatcccggtgctgcagaagggat

SEQ ID NO: 3358 - DNA, 31 bp, synthetic construct
  misc_feature 1..31: note = Synthetic
  source 1..31: mol_type = other DNA
ggaaaagcgatctaggtgctgcagaagggat

SEQ ID NO: 3359 - DNA, 31 bp, synthetic construct; identical to SEQ ID NO: 690
  misc_feature 1..31: note = Synthetic
  source 1..31: mol_type = other DNA

SEQ ID NO: 3360 - DNA, 31 bp, synthetic construct; identical to SEQ ID NO: 3121
  misc_feature 1..31: note = Synthetic
  source 1..31: mol_type = other DNA

SEQ ID NO: 3361 - DNA, 31 bp, synthetic construct
  misc_feature 1..31: note = Synthetic
  source 1..31: mol_type = other DNA
ggaaaagcggtccaggtgctgcagaagggat

SEQ ID NO: 3362 - DNA, 31 bp, synthetic construct
  misc_feature 1..31: note = Synthetic
  source 1..31: mol_type = other DNA
ggaaaagagatccaggtgctgcagaagggat

SEQ ID NO: 3363 - DNA, 30 bp, synthetic construct; identical to SEQ ID NO: 687
  misc_feature 1..30: note = Synthetic
  source 1..30: mol_type = other DNA

SEQ ID NO: 3364 - DNA, 30 bp, synthetic construct
  misc_feature 1..30: note = Synthetic
  source 1..30: mol_type = other DNA
gtgatgggagccctacttcttctgctcgga

SEQ ID NO: 3365 - DNA, 30 bp, synthetic construct
  misc_feature 1..30: note = Synthetic
  source 1..30: mol_type = other DNA
gtgatgggagcccctcttcttctgctcgga

SEQ ID NO: 3366 - DNA, 30 bp, synthetic construct
  misc_feature 1..30: note = Synthetic
  source 1..30: mol_type = other DNA
gtgatgggagccgttcttcttctgctcgga

SEQ ID NO: 3367 - DNA, 30 bp, synthetic construct
  misc_feature 1..30: note = Synthetic
  source 1..30: mol_type = other DNA
gtgatgggagctcttcttcttctgctcgga

SEQ ID NO: 3368 - DNA, 30 bp, synthetic construct; identical to SEQ ID NO: 686
  misc_feature 1..30: note = Synthetic
  source 1..30: mol_type = other DNA

SEQ ID NO: 3369 - DNA, 30 bp, synthetic construct
  misc_feature 1..30: note = Synthetic
  source 1..30: mol_type = other DNA
gtgatgggatcccttcttcttctgctcgga

SEQ ID NO: 3370 - DNA, 30 bp, synthetic construct
  misc_feature 1..30: note = Synthetic
  source 1..30: mol_type = other DNA
gtgatgggtgcccttcttcttctgctcgga

SEQ ID NO: 3371 - DNA, 30 bp, synthetic construct
  misc_feature 1..30: note = Synthetic
  source 1..30: mol_type = other DNA
gtgatgggggcccttcttcttctgctcgga

SEQ ID NO: 3372 - DNA, 30 bp, synthetic construct
  misc_feature 1..30: note = Synthetic
  source 1..30: mol_type = other DNA
gtgatgggcgcccttcttcttctgctcgga

SEQ ID NO: 3373 - DNA, 30 bp, synthetic construct
  misc_feature 1..30: note = Synthetic
  source 1..30: mol_type = other DNA
gtgatggcagcccttcttcttctgctcgga

SEQ ID NO: 3374 - DNA, 30 bp, synthetic construct
  misc_feature 1..30: note = Synthetic
  source 1..30: mol_type = other DNA
gtgatggaagcccttcttcttctgctcgga

SEQ ID NO: 3375 - DNA, 30 bp, synthetic construct
  misc_feature 1..30: note = Synthetic
  source 1..30: mol_type = other DNA
tgtctgaagccatctcttcctcctgaaaat

SEQ ID NO: 3376 - DNA, 30 bp, synthetic construct
  misc_feature 1..30: note = Synthetic
  source 1..30: mol_type = other DNA
tgtctgaagccatcccttcctcctgaaaat

SEQ ID NO: 3377 - DNA, 30 bp, synthetic construct
  misc_feature 1..30: note = Synthetic
  source 1..30: mol_type = other DNA
tgtctgaagccatcacttcctcctgaaaat

SEQ ID NO: 3378 - DNA, 30 bp, synthetic construct
  misc_feature 1..30: note = Synthetic
  source 1..30: mol_type = other DNA
tgtctgaagccattgcttcctcctgaaaat

SEQ ID NO: 3379 - DNA, 30 bp, synthetic construct
  misc_feature 1..30: note = Synthetic
  source 1..30: mol_type = other DNA
tgtctgaagccagcgcttcctcctgaaaat

SEQ ID NO: 3380 - DNA, 30 bp, synthetic construct
  misc_feature 1..30: note = Synthetic
  source 1..30: mol_type = other DNA
tgtctgaagccaccgcttcctcctgaaaat

SEQ ID NO: 3381 - DNA, 30 bp, synthetic construct
  misc_feature 1..30: note = Synthetic
  source 1..30: mol_type = other DNA
tgtctgaagccaacgcttcctcctgaaaat

SEQ ID NO: 3382 - DNA, 30 bp, synthetic construct
  misc_feature 1..30: note = Synthetic
  source 1..30: mol_type = other DNA
tgtctgaagccttcgcttcctcctgaaaat

SEQ ID NO: 3383 - DNA, 30 bp, synthetic construct
  misc_feature 1..30: note = Synthetic
  source 1..30: mol_type = other DNA
tgtctgaagccgtcgcttcctcctgaaaat

SEQ ID NO: 3384 - DNA, 30 bp, synthetic construct
  misc_feature 1..30: note = Synthetic
  source 1..30: mol_type = other DNA
tgtctgaagccctcgcttcctcctgaaaat

SEQ ID NO: 3385 - DNA, 30 bp, synthetic construct
  misc_feature 1..30: note = Synthetic
  source 1..30: mol_type = other DNA
tgtctgaagcaatcgcttcctcctgaaaat

SEQ ID NO: 3386 - DNA, 30 bp, synthetic construct
  misc_feature 1..30: note = Synthetic
  source 1..30: mol_type = other DNA
tgtctgaaggcatcgcttcctcctgaaaat

SEQ ID NO: 3387 - DNA, 35 bp, synthetic construct
  misc_feature 1..35: note = Synthetic
  source 1..35: mol_type = other DNA
aatgtgccatctggagccctcttctggcctgcaga

SEQ ID NO: 3388 - DNA, 35 bp, synthetic construct
  misc_feature 1..35: note = Synthetic
  source 1..35: mol_type = other DNA
aatgtgccatctggagccctcgtctggcctgcaga

SEQ ID NO: 3389 - DNA, 35 bp, synthetic construct
  misc_feature 1..35: note = Synthetic
  source 1..35: mol_type = other DNA
aatgtgccatctggagccctcctctggcctgcaga

SEQ ID NO: 3390 - DNA, 35 bp, synthetic construct
  misc_feature 1..35: note = Synthetic
  source 1..35: mol_type = other DNA
aatgtgccatctggagcccttatctggcctgcaga

SEQ ID NO: 3391 - DNA, 35 bp, synthetic construct
  misc_feature 1..35: note = Synthetic
  source 1..35: mol_type = other DNA
aatgtgccatctggagcccgcatctggcctgcaga

SEQ ID NO: 3392 - DNA, 35 bp, synthetic construct
  misc_feature 1..35: note = Synthetic
  source 1..35: mol_type = other DNA
aatgtgccatctggagcccccatctggcctgcaga

SEQ ID NO: 3393 - DNA, 35 bp, synthetic construct
  misc_feature 1..35: note = Synthetic
  source 1..35: mol_type = other DNA
aatgtgccatctggagcccacatctggcctgcaga

SEQ ID NO: 3394 - DNA, 35 bp, synthetic construct
  misc_feature 1..35: note = Synthetic
  source 1..35: mol_type = other DNA
aatgtgccatctggagcactcatctggcctgcaga

SEQ ID NO: 3395 - DNA, 35 bp, synthetic construct
  misc_feature 1..35: note = Synthetic
  source 1..35: mol_type = other DNA
aatgtgccatctggaggcctcatctggcctgcaga

SEQ ID NO: 3396 - DNA, 35 bp, synthetic construct
  misc_feature 1..35: note = Synthetic
  source 1..35: mol_type = other DNA
aatgtgccatctggatccctcatctggcctgcaga

SEQ ID NO: 3397 - DNA, 35 bp, synthetic construct
  misc_feature 1..35: note = Synthetic
  source 1..35: mol_type = other DNA
aatgtgccatctggaaccctcatctggcctgcaga

SEQ ID NO: 3398 - DNA, 35 bp, synthetic construct
  misc_feature 1..35: note = Synthetic
  source 1..35: mol_type = other DNA
aatgtgccatctgcagccctcatctggcctgcaga

SEQ ID NO: 3399 - DNA, 24 bp, synthetic construct
  misc_feature 1..24: note = Synthetic
  source 1..24: mol_type = other DNA
gtcacccctggttctggcaccagg

SEQ ID NO: 3400 - DNA, 24 bp, synthetic construct
  misc_feature 1..24: note = Synthetic
  source 1..24: mol_type = other DNA
gtcacccctgcttctggcaccagg

SEQ ID NO: 3401 - DNA, 24 bp, synthetic construct
  misc_feature 1..24: note = Synthetic
  source 1..24: mol_type = other DNA
gtcacccctttttctggcaccagg

SEQ ID NO: 3402 - DNA, 24 bp, synthetic construct
  misc_feature 1..24: note = Synthetic
  source 1..24: mol_type = other DNA
gtcacccctctttctggcaccagg

SEQ ID NO: 3403 - DNA, 24 bp, synthetic construct
  misc_feature 1..24: note = Synthetic
  source 1..24: mol_type = other DNA
gtcacccctatttctggcaccagg

SEQ ID NO: 3404 - DNA, 24 bp, synthetic construct
  misc_feature 1..24: note = Synthetic
  source 1..24: mol_type = other DNA
gtcaccccagtttctggcaccagg

SEQ ID NO: 3405 - DNA, 24 bp, synthetic construct
  misc_feature 1..24: note = Synthetic
  source 1..24: mol_type = other DNA
gtcacccttgtttctggcaccagg

SEQ ID NO: 3406 - DNA, 24 bp, synthetic construct
  misc_feature 1..24: note = Synthetic
  source 1..24: mol_type = other DNA
gtcaccactgtttctggcaccagg

SEQ ID NO: 3407 - DNA, 24 bp, synthetic construct
  misc_feature 1..24: note = Synthetic
  source 1..24: mol_type = other DNA
gtcacgcctgtttctggcaccagg

SEQ ID NO: 3408 - DNA, 32 bp, synthetic construct
  misc_feature 1..32: note = Synthetic
  source 1..32: mol_type = other DNA
gccctcccgtctcccctgtttctggcaccagg

SEQ ID NO: 3409 - DNA, 32 bp, synthetic construct
  misc_feature 1..32: note = Synthetic
  source 1..32: mol_type = other DNA
gccctcccgtcgcccctgtttctggcaccagg

SEQ ID NO: 3410 - DNA, 32 bp, synthetic construct
  misc_feature 1..32: note = Synthetic
  source 1..32: mol_type = other DNA
gccctcccgtcccccctgtttctggcaccagg

SEQ ID NO: 3411 - DNA, 42 bp, synthetic construct
  misc_feature 1..42: note = Synthetic
  source 1..42: mol_type = other DNA
tggaggaagcagggcttcctttcctctgccgtgctcagtctg

SEQ ID NO: 3412 - DNA, 37 bp, synthetic construct
  misc_feature 1..37: note = Synthetic
  source 1..37: mol_type = other DNA
tggaggaagcagggcttcctttcccgtgctcagtctg

SEQ ID NO: 3413 - DNA, 32 bp, synthetic construct
  misc_feature 1..32: note = Synthetic
  source 1..32: mol_type = other DNA
tggaggaagcagggcttcccgtgctcagtctg

SEQ ID NO: 3414 - DNA, 39 bp, synthetic construct
  misc_feature 1..39: note = Synthetic
  source 1..39: mol_type = other DNA
tgtcctgcgacgccctctggaggaagcgtgctcagtctg

SEQ ID NO: 3415 - DNA, 34 bp, synthetic construct
  misc_feature 1..34: note = Synthetic
  source 1..34: mol_type = other DNA
tgtcctgcgacgccctctggacgtgctcagtctg

SEQ ID NO: 3416 - DNA, 33 bp, synthetic construct
  misc_feature 1..33: note = Synthetic
  source 1..33: mol_type = other DNA
agtatcccggtgcaggagctcgtgctcagtctg

SEQ ID NO: 3417 - DNA, 24 bp, synthetic construct
  misc_feature 1..24: note = Synthetic
  source 1..24: mol_type = other DNA
tctgccatcatcgtgctcagtctg

SEQ ID NO: 3418 - DNA, 26 bp, synthetic construct
  misc_feature 1..26: note = Synthetic
  source 1..26: mol_type = other DNA
tctgccatcaaagcgtgctcagtctg

SEQ ID NO: 3419 - DNA, 22 bp, synthetic construct
  misc_feature 1..22: note = Synthetic
  source 1..22: mol_type = other DNA
tctgccatccgtgctcagtctg

SEQ ID NO: 3420 - DNA, 44 bp, synthetic construct
  misc_feature 1..44: note = Synthetic
  source 1..44: mol_type = other DNA
tggaggaagcagggcttcctttcctctgccacgtgctcagtctg

SEQ ID NO: 3421 - DNA, 30 bp, synthetic construct
  misc_feature 1..30: note = Synthetic
  source 1..30: mol_type = other DNA
aacgaacacctcagagtaatgactaagatg

SEQ ID NO: 3422 - DNA, 32 bp, synthetic construct; identical to SEQ ID NO: 648
  misc_feature 1..32: note = Synthetic
  source 1..32: mol_type = other DNA

SEQ ID NO: 3423 - DNA, 28 bp, synthetic construct
  misc_feature 1..28: note = Synthetic
  source 1..28: mol_type = other DNA
aacgaacacccaggtaatgactaagatg

SEQ ID NO: 3424 - DNA, 26 bp, synthetic construct
  misc_feature 1..26: note = Synthetic
  source 1..26: mol_type = other DNA
aacgaacacaggtaatgactaagatg

SEQ ID NO: 3425 - DNA, 32 bp, synthetic construct
  misc_feature 1..32: note = Synthetic
  source 1..32: mol_type = other DNA
ggaaaagcgatccagggtgctgcagaagggat

SEQ ID NO: 3426 - DNA, 34 bp, synthetic construct; identical to SEQ ID NO: 692
  misc_feature 1..34: note = Synthetic
  source 1..34: mol_type = other DNA

SEQ ID NO: 3427 - DNA, 30 bp, synthetic construct
  misc_feature 1..30: note = Synthetic
  source 1..30: mol_type = other DNA
ggaaaagcgatcaggtgctgcagaagggat

SEQ ID NO: 3428 - DNA, 28 bp, synthetic construct
  misc_feature 1..28: note = Synthetic
  source 1..28: mol_type = other DNA
ggaaaagcgaaggtgctgcagaagggat

SEQ ID NO: 3429 - DNA, 31 bp, synthetic construct
  misc_feature 1..31: note = Synthetic
  source 1..31: mol_type = other DNA
gtgatgggagcaccttcttcttctgctcgga

SEQ ID NO: 3430 - DNA, 33 bp, synthetic construct; identical to SEQ ID NO: 688
  misc_feature 1..33: note = Synthetic
  source 1..33: mol_type = other DNA

SEQ ID NO: 3431 - DNA, 29 bp, synthetic construct
  misc_feature 1..29: note = Synthetic
  source 1..29: mol_type = other DNA
gtgatgggagccttcttcttctgctcgga

SEQ ID NO: 3432 - DNA, 27 bp, synthetic construct
  misc_feature 1..27: note = Synthetic
  source 1..27: mol_type = other DNA
gtgatgggagttcttcttctgctcgga

SEQ ID NO: 3433 - DNA, 31 bp, synthetic construct
  misc_feature 1..31: note = Synthetic
  source 1..31: mol_type = other DNA
tgtctgaagccatcggcttcctcctgaaaat

SEQ ID NO: 3434 - DNA, 33 bp, synthetic construct
  misc_feature 1..33: note = Synthetic
  source 1..33: mol_type = other DNA
tgtctgaagccatccatgcttcctcctgaaaat

SEQ ID NO: 3435 - DNA, 29 bp, synthetic construct
  misc_feature 1..29: note = Synthetic
  source 1..29: mol_type = other DNA
tgtctgaagccatgcttcctcctgaaaat

SEQ ID NO: 3436 - DNA, 27 bp, synthetic construct
  misc_feature 1..27: note = Synthetic
  source 1..27: mol_type = other DNA
tgtctgaagccgcttcctcctgaaaat

SEQ ID NO: 3437 - DNA, 36 bp, synthetic construct
  misc_feature 1..36: note = Synthetic
  source 1..36: mol_type = other DNA
aatgtgccatctggagccgctcatctggcctgcaga

SEQ ID NO: 3438 - DNA, 38 bp, synthetic construct
  misc_feature 1..38: note = Synthetic
  source 1..38: mol_type = other DNA
aatgtgccatctggagcccttgtcatctggcctgcaga

SEQ ID NO: 3439 - DNA, 34 bp, synthetic construct
  misc_feature 1..34: note = Synthetic
  source 1..34: mol_type = other DNA
aatgtgccatctggagccccatctggcctgcaga

SEQ ID NO: 3440 - DNA, 32 bp, synthetic construct
  misc_feature 1..32: note = Synthetic
  source 1..32: mol_type = other DNA
aatgtgccatctggagccatctggcctgcaga

SEQ ID NO: 3441 - DNA, 29 bp, synthetic construct
  misc_feature 1..29: note = Synthetic
  source 1..29: mol_type = other DNA
tcccgtcacccgctgtttctggcaccagg

SEQ ID NO: 3442 - DNA, 31 bp, synthetic construct
  misc_feature 1..31: note = Synthetic
  source 1..31: mol_type = other DNA
tcccgtcacccctgtgatttctggcaccagg

SEQ ID NO: 3443 - DNA, 27 bp, synthetic construct
  misc_feature 1..27: note = Synthetic
  source 1..27: mol_type = other DNA
tcccgtcaccccgtttctggcaccagg

SEQ ID NO: 3444 - DNA, 25 bp, synthetic construct
  misc_feature 1..25: note = Synthetic
  source 1..25: mol_type = other DNA
tcccgtcaccgtttctggcaccagg

SEQ ID NO: 3445 - DNA, 49 bp, synthetic construct
  misc_feature 1..49: note = Synthetic
  source 1..49: mol_type = other DNA
tggaggaagcagggcttcctttcctctgcatcaaagcgtgctcagtctg

SEQ ID NO: 3446 - DNA, 50 bp, synthetic construct
  misc_feature 1..50: note = Synthetic
  source 1..50: mol_type = other DNA
tggaggaagcagggcttcctttcctctgccatgaaagcgtgctcagtctg

SEQ ID NO: 3447 - DNA, 46 bp, synthetic construct
  misc_feature 1..46: note = Synthetic
  source 1..46: mol_type = other DNA
tggaggaagcagggcttcctttcctctgcgatccgtgctcagtctg

SEQ ID NO: 3448 - DNA, 47 bp, synthetic construct
  misc_feature 1..47: note = Synthetic
  source 1..47: mol_type = other DNA
tggaggaagcagggcttcctttcctctgacatgacgtgctcagtctg

SEQ ID NO: 3449 - DNA, 29 bp, synthetic construct
  misc_feature 1..29: note = Synthetic
  source 1..29: mol_type = other DNA
aacgaacaccattggtaatgactaagatg

SEQ ID NO: 3450 - DNA, 30 bp, synthetic construct
  misc_feature 1..30: note = Synthetic
  source 1..30: mol_type = other DNA
aacgaacacgtcagtgtaatgactaagatg

SEQ ID NO: 3451 - DNA, 27 bp, synthetic construct
  misc_feature 1..27: note = Synthetic
  source 1..27: mol_type = other DNA
aacgaacaactcgtaatgactaagatg

SEQ ID NO: 3452 - DNA, 29 bp, synthetic construct
  misc_feature 1..29: note = Synthetic
  source 1..29: mol_type = other DNA
aacgaacacatcatgtaatgactaagatg

SEQ ID NO: 3453 - DNA, 30 bp, synthetic construct
  misc_feature 1..30: note = Synthetic
  source 1..30: mol_type = other DNA
ggaaaagcgatcggtagctgcagaagggat

SEQ ID NO: 3454 - DNA, 32 bp, synthetic construct
  misc_feature 1..32: note = Synthetic
  source 1..32: mol_type = other DNA
ggaaaagcgattcaggtagctgcagaagggat

SEQ ID NO: 3455 - DNA, 30 bp, synthetic construct
  misc_feature 1..30: note = Synthetic
  source 1..30: mol_type = other DNA
ggaaaagcgatcaagtgctgcagaagggat

SEQ ID NO: 3456 - DNA, 20 bp, synthetic construct
  misc_feature 1..20: note = Synthetic
  source 1..20: mol_type = other DNA
gtcaaccagtatcccggtgc

SEQ ID NO: 3457 - DNA, 20 bp, synthetic construct
  misc_feature 1..20: note = Synthetic
  source 1..20: mol_type = other DNA
gtcaaccagtatcccggtgc

SEQ ID NO: 3458 - DNA, 21 bp, synthetic construct
  misc_feature 1..21: note = Synthetic
  source 1..21: mol_type = other DNA
gtcaaccattaagcaaaacat

SEQ ID NO: 3459 - DNA, 20 bp, synthetic construct
  misc_feature 1..20: note = Synthetic
  source 1..20: mol_type = other DNA
ggggtcccaggtgctgacgt

SEQ ID NO: 3460 - DNA, 20 bp, synthetic construct
  misc_feature 1..20: note = Synthetic
  source 1..20: mol_type = other DNA
gacatcgatgtcctccccat

SEQ ID NO: 3461 - DNA, 21 bp, synthetic construct
  misc_feature 1..21: note = Synthetic
  source 1..21: mol_type = other DNA
gatgaagcactgtgggtacga

SEQ ID NO: 3462 - DNA, 21 bp, synthetic construct
  misc_feature 1..21: note = Synthetic
  source 1..21: mol_type = other DNA
gatgtacagagagcccagggc

SEQ ID NO: 3463 - DNA, 21 bp, synthetic construct
  misc_feature 1..21: note = Synthetic
  source 1..21: mol_type = other DNA
gcccttcagctaaaataaagg

SEQ ID NO: 3464 - DNA, 20 bp, synthetic construct
  misc_feature 1..20: note = Synthetic
  source 1..20: mol_type = other DNA
ggcccagactgagcacgtga

SEQ ID NO: 3465 - DNA, 20 bp, synthetic construct
  misc_feature 1..20: note = Synthetic
  source 1..20: mol_type = other DNA
ggcccagactgagcacgtga

SEQ ID NO: 3466 - DNA, 20 bp, synthetic construct
  misc_feature 1..20: note = Synthetic
  source 1..20: mol_type = other DNA
ggcccagactgagcacgtga

SEQ ID NO: 3467 - DNA, 20 bp, synthetic construct
  misc_feature 1..20: note = Synthetic
  source 1..20: mol_type = other DNA
ggaatcccttctgcagcacc

SEQ ID NO: 3468 - DNA, 20 bp, synthetic construct
  misc_feature 1..20: note = Synthetic
  source 1..20: mol_type = other DNA
ggaatcccttctgcagcacc

SEQ ID NO: 3469 - DNA, 20 bp, synthetic construct
  misc_feature 1..20: note = Synthetic
  source 1..20: mol_type = other DNA
ggaatcccttctgcagcacc

SEQ ID NO: 3470 - DNA, 20 bp, synthetic construct
  misc_feature 1..20: note = Synthetic
  source 1..20: mol_type = other DNA
gagtccgagcagaagaagaa

SEQ ID NO: 3471 - DNA, 20 bp, synthetic construct
  misc_feature 1..20: note = Synthetic
  source 1..20: mol_type = other DNA
gagtccgagcagaagaagaa

SEQ ID NO: 3472 - DNA, 20 bp, synthetic construct
  misc_feature 1..20: note = Synthetic
  source 1..20: mol_type = other DNA
gagtccgagcagaagaagaa

SEQ ID NO: 3473 - DNA, 20 bp, synthetic construct
  misc_feature 1..20: note = Synthetic
  source 1..20: mol_type = other DNA
gagtccgagcagaagaagaa

SEQ ID NO: 3474 - DNA, 20 bp, synthetic construct
  misc_feature 1..20: note = Synthetic
  source 1..20: mol_type = other DNA
gagtccgagcagaagaagaa

SEQ ID NO: 3475 - DNA, 20 bp, synthetic construct
  misc_feature 1..20: note = Synthetic
  source 1..20: mol_type = other DNA
gagtccgagcagaagaagaa

SEQ ID NO: 3476 - DNA, 20 bp, synthetic construct
  misc_feature 1..20: note = Synthetic
  source 1..20: mol_type = other DNA
gagtccgagcagaagaagaa

SEQ ID NO: 3477 - DNA, 20 bp, synthetic construct
  misc_feature 1..20: note = Synthetic
  source 1..20: mol_type = other DNA
ggcccagactgagcacgtga

SEQ ID NO: 3478 - DNA, 20 bp, synthetic construct
  misc_feature 1..20: note = Synthetic
  source 1..20: mol_type = other DNA
ggcccagactgagcacgtga

SEQ ID NO: 3479 - DNA, 23 bp, synthetic construct
  misc_feature 1..23: note = Synthetic
  source 1..23: mol_type = other DNA
tctgtcatcacgtgctcagtctg

SEQ ID NO: 3480 - DNA, 23 bp, synthetic construct
  misc_feature 1..23: note = Synthetic
  source 1..23: mol_type = other DNA
tctgctatcacgtgctcagtctg

SEQ ID NO: 3481 - DNA, 23 bp, synthetic construct
  misc_feature 1..23: note = Synthetic
  source 1..23: mol_type = other DNA
tctgccattacgtgctcagtctg

SEQ ID NO: 3482 - DNA, 31 bp, synthetic construct
  misc_feature 1..31: note = Synthetic
  source 1..31: mol_type = other DNA
ggaaaagtgatccaggtgctgcagaagggat

SEQ ID NO: 3483 - DNA, 31 bp, synthetic construct
  misc_feature 1..31: note = Synthetic
  source 1..31: mol_type = other DNA
ggaaaagcgattcaggtgctgcagaagggat

SEQ ID NO: 3484 - DNA, 31 bp, synthetic construct; identical to SEQ ID NO: 3358
  misc_feature 1..31: note = Synthetic
  source 1..31: mol_type = other DNA

SEQ ID NO: 3485 - DNA, 30 bp, synthetic construct
  misc_feature 1..30: note = Synthetic
  source 1..30: mol_type = other DNA
gtgatgggagtccttcttcttctgctcgga

SEQ ID NO: 3486 - DNA, 30 bp, synthetic construct; identical to SEQ ID NO: 3367
  misc_feature 1..30: note = Synthetic
  source 1..30: mol_type = other DNA

SEQ ID NO: 3487 - DNA, 30 bp, synthetic construct
  misc_feature 1..30: note = Synthetic
  source 1..30: mol_type = other DNA
gtgatgggagcctttcttcttctgctcgga

SEQ ID NO: 3488 - DNA, 30 bp, synthetic construct
  misc_feature 1..30: note = Synthetic
  source 1..30: mol_type = other DNA
gtgatgggagttcttcttcttctgctcgga

SEQ ID NO: 3489 - DNA, 30 bp, synthetic construct
  misc_feature 1..30: note = Synthetic
  source 1..30: mol_type = other DNA
gtgatgggagtctttcttcttctgctcgga

SEQ ID NO: 3490 - DNA, 30 bp, synthetic construct
  misc_feature 1..30: note = Synthetic
  source 1..30: mol_type = other DNA
gtgatgggagcttttcttcttctgctcgga

SEQ ID NO: 3491 - DNA, 30 bp, synthetic construct
  misc_feature 1..30: note = Synthetic
  source 1..30: mol_type = other DNA
gtgatgggagtttttcttcttctgctcgga

SEQ ID NO: 3492 - DNA, 23 bp, synthetic construct
  misc_feature 1..23: note = Synthetic
  source 1..23: mol_type = other DNA
tctgccgtcacgtgctcagtctg

SEQ ID NO: 3493 - DNA, 23 bp, synthetic construct
  misc_feature 1..23: note = Synthetic
  source 1..23: mol_type = other DNA
tctgccatcgcgtgctcagtctg

SEQ ID NO: 3494 - DNA, 20 bp, synthetic construct
  misc_feature 1..20: note = Synthetic
  source 1..20: mol_type = other DNA
ggcccagactgagcacgtga

SEQ ID NO: 3495 - DNA, 20 bp, synthetic construct
  misc_feature 1..20: note = Synthetic
  source 1..20: mol_type = other DNA
ggcccagactgagcacgtga

SEQ ID NO: 3496 - DNA, 20 bp, synthetic construct
  misc_feature 1..20: note = Synthetic
  source 1..20: mol_type = other DNA
gagtccgagcagaagaagaa

SEQ ID NO: 3497 - DNA, 20 bp, synthetic construct
  misc_feature 1..20: note = Synthetic
  source 1..20: mol_type = other DNA
gagtccgagcagaagaagaa

SEQ ID NO: 3498 - DNA, 20 bp, synthetic construct
  misc_feature 1..20: note = Synthetic
  source 1..20: mol_type = other DNA
ggaatcccttctgcagcacc

SEQ ID NO: 3499 - DNA, 20 bp, synthetic construct
  misc_feature 1..20: note = Synthetic
  source 1..20: mol_type = other DNA
ggaatcccttctgcagcacc

SEQ ID NO: 3500 - DNA, 20 bp, synthetic construct
  misc_feature 1..20: note = Synthetic
  source 1..20: mol_type = other DNA
ggcccagactgagcacgtga

SEQ ID NO: 3501 - DNA, 20 bp, synthetic construct
  misc_feature 1..20: note = Synthetic
  source 1..20: mol_type = other DNA
ggcccagactgagcacgtga

SEQ ID NO: 3502 - DNA, 20 bp, synthetic construct
  misc_feature 1..20: note = Synthetic
  source 1..20: mol_type = other DNA
ggcccagactgagcacgtga

SEQ ID NO: 3503 - DNA, 20 bp, synthetic construct
  misc_feature 1..20: note = Synthetic
  source 1..20: mol_type = other DNA
ggcccagactgagcacgtga

SEQ ID NO: 3504 - DNA, 20 bp, synthetic construct
  misc_feature 1..20: note = Synthetic
  source 1..20: mol_type = other DNA
ggcccagactgagcacgtga

SEQ ID NO: 3505 - DNA, 20 bp, synthetic construct
  misc_feature 1..20: note = Synthetic
  source 1..20: mol_type = other DNA
ggcccagactgagcacgtga

SEQ ID NO: 3506 - DNA, 21 bp, synthetic construct
  misc_feature 1..21: note = Synthetic
  source 1..21: mol_type = other DNA
gcatggtgcacctgactcctg

SEQ ID NO: 3507 - DNA, 21 bp, synthetic construct
  misc_feature 1..21: note = Synthetic
  source 1..21: mol_type = other DNA
gcatggtgcacctgactcctg

SEQ ID NO: 3508 - DNA, 21 bp, synthetic construct
  misc_feature 1..21: note = Synthetic
  source 1..21: mol_type = other DNA
gcatggtgcacctgactcctg

SEQ ID NO: 3509 - DNA, 21 bp, synthetic construct
  misc_feature 1..21: note = Synthetic
  source 1..21: mol_type = other DNA
gcatggtgcacctgactcctg

SEQ ID NO: 3510 - DNA, 21 bp, synthetic construct
  misc_feature 1..21: note = Synthetic
  source 1..21: mol_type = other DNA
gcatggtgcacctgactcctg

SEQ ID NO: 3511 - DNA, 21 bp, synthetic construct
  misc_feature 1..21: note = Synthetic
  source 1..21: mol_type = other DNA
gcatggtgcacctgactcctg

SEQ ID NO: 3512 - DNA, 21 bp, synthetic construct
  misc_feature 1..21: note = Synthetic
  source 1..21: mol_type = other DNA
gtacctgaaccgtatatccta

SEQ ID NO: 3513 - DNA, 21 bp, synthetic construct
  misc_feature 1..21: note = Synthetic
  source 1..21: mol_type = other DNA
gatccttccagtcagggccat

SEQ ID NO: 3514 - DNA, 21 bp, synthetic construct
  misc_feature 1..21: note = Synthetic
  source 1..21: mol_type = other DNA
gatccttccagtcagggccat

SEQ ID NO: 3515 - DNA, 20 bp, synthetic construct
  misc_feature 1..20: note = Synthetic
  source 1..20: mol_type = other DNA
gcagtggtggggggccttgg

SEQ ID NO: 3516 - DNA, 20 bp, synthetic construct
  misc_feature 1..20: note = Synthetic
  source 1..20: mol_type = other DNA
ggcccagactgagcacgtga

SEQ ID NO: 3517 - DNA, 20 bp, synthetic construct
  misc_feature 1..20: note = Synthetic
  source 1..20: mol_type = other DNA
ggcccagactgagcacgtga

SEQ ID NO: 3518 - DNA, 20 bp, synthetic construct
  misc_feature 1..20: note = Synthetic
  source 1..20: mol_type = other DNA
gtcatcttagtcattacctg

SEQ ID NO: 3519 - DNA, 21 bp, synthetic construct
  misc_feature 1..21: note = Synthetic
  source 1..21: mol_type = other DNA
gcatggtgcacctgactcctg

SEQ ID NO: 3520 - DNA, 20 bp, synthetic construct
  misc_feature 1..20: note = Synthetic
  source 1..20: mol_type = other DNA
ggcccagactgagcacgtga

SEQ ID NO: 3521 - DNA, 20 bp, synthetic construct
  misc_feature 1..20: note = Synthetic
  source 1..20: mol_type = other DNA
ggcccagactgagcacgtga

SEQ ID NO: 3522 - DNA, 23 bp, synthetic construct
  misc_feature 1..23: note = Synthetic
  source 1..23: mol_type = other DNA
tctgccatgacgtgctcagtctg

SEQ ID NO: 3523 - DNA, 26 bp, synthetic construct
  misc_feature 1..26: note = Synthetic
  source 1..26: mol_type = other DNA
atgggagcccttgttcttctgctcgg

SEQ ID NO: 3524 - DNA, 28 bp, synthetic construct
  misc_feature 1..28: note = Synthetic
  source 1..28: mol_type = other DNA
aaaagcgatcaaggtgctgcagaaggga

SEQ ID NO: 3525 - DNA, 65 bp, synthetic construct
  misc_feature 1..65: note = Synthetic
  source 1..65: mol_type = other DNA
tggaggaagcagggcttcctttcctctgccatcaatgatggtgatgatggtgcgtgctcagtctg

SEQ ID NO: 3526 - DNA, 23 bp, synthetic construct
  misc_feature 1..23: note = Synthetic
  source 1..23: mol_type = other DNA
tctgcaatcacgtgctcagtctg

SEQ ID NO: 3527 - DNA, 26 bp, synthetic construct
  misc_feature 1..26: note = Synthetic
  source 1..26: mol_type = other DNA
tctgccatcaaagcgtgctcagtctg

SEQ ID NO: 3528 - DNA, 27 bp, synthetic construct
  misc_feature 1..27: note = Synthetic
  source 1..27: mol_type = other DNA
agacttctccacaggagtcaggtgcac

SEQ ID NO: 3529 - DNA, 27 bp, synthetic construct
  misc_feature 1..27: note = Synthetic
  source 1..27: mol_type = other DNA
agacttctcctcaggagtcaggtgcac

SEQ ID NO: 3530 - DNA, 27 bp, synthetic construct
  misc_feature 1..27: note = Synthetic
  source 1..27: mol_type = other DNA
agacttctcttcaggagtcaggtgcac

SEQ ID NO: 3531 - DNA, 30 bp, synthetic construct
  misc_feature 1..30: note = Synthetic
  source 1..30: mol_type = other DNA
agtcagggccataggatagatatacggttc

SEQ ID NO: 3532 - DNA, 31 bp, synthetic construct
  misc_feature 1..31: note = Synthetic
  source 1..31: mol_type = other DNA
acctgaaccgtatatcctatggccctgactg

SEQ ID NO: 3533 - DNA, 32 bp, synthetic construct
  misc_feature 1..32: note = Synthetic
  source 1..32: mol_type = other DNA
gtacctgaaccgtatatcttatggccctgact

SEQ ID NO: 3534 - DNA, 24 bp, synthetic construct
  misc_feature 1..24: note = Synthetic
  source 1..24: mol_type = other DNA
atgtagacgccaaggccccccacc

SEQ ID NO: 3535 - DNA, 23 bp, synthetic construct
  misc_feature 1..23: note = Synthetic
  source 1..23: mol_type = other DNA
tctgccatcccgtgctcagtctg

SEQ ID NO: 3536 - DNA, 26 bp, synthetic construct
  misc_feature 1..26: note = Synthetic
  source 1..26: mol_type = other DNA
tctgccatcaaagcgtgctcagtctg

SEQ ID NO: 3537 - DNA, 29 bp, synthetic construct
  misc_feature 1..29: note = Synthetic
  source 1..29: mol_type = other DNA
aacgaacacctcacgtaatgactaagatg

SEQ ID NO: 3538 - DNA, 27 bp, synthetic construct
  misc_feature 1..27: note = Synthetic
  source 1..27: mol_type = other DNA
agacttctccacaggagtcaggtgcac

SEQ ID NO: 3539 - DNA, 65 bp, synthetic construct; identical to SEQ ID NO: 3525
  misc_feature 1..65: note = Synthetic
  source 1..65: mol_type = other DNA

SEQ ID NO: 3540 - DNA, 71 bp, synthetic construct
  misc_feature 1..71: note = Synthetic
  source 1..71: mol_type = other DNA
tggaggaagcagggcttcctttcctctgccatcacttatcgtcgtcatccttgtaatccgtgctcagtctg

SEQ ID NO: 3541 - DNA, 20 bp, synthetic construct
  misc_feature 1..20: note = Synthetic
  source 1..20: mol_type = other DNA
ggcccagactgagcacgtga

SEQ ID NO: 3542 - DNA, 20 bp, synthetic construct
  misc_feature 1..20: note = Synthetic
  source 1..20: mol_type = other DNA
ggcccagactgagcacgtga

SEQ ID NO: 3543 - DNA, 20 bp, synthetic construct
  misc_feature 1..20: note = Synthetic
  source 1..20: mol_type = other DNA
ggcccagactgagcacgtga

SEQ ID NO: 3544 - DNA, 20 bp, synthetic construct
  misc_feature 1..20: note = Synthetic
  source 1..20: mol_type = other DNA
ggcccagactgagcacgtga

SEQ ID NO: 3545 - DNA, 20 bp, synthetic construct
  misc_feature 1..20: note = Synthetic
  source 1..20: mol_type = other DNA
ggcccagactgagcacgtga

SEQ ID NO: 3546 - DNA, 20 bp, synthetic construct
  misc_feature 1..20: note = Synthetic
  source 1..20: mol_type = other DNA
gtcatcttagtcattacctg

SEQ ID NO: 3547 - DNA, 20 bp, synthetic construct
  misc_feature 1..20: note = Synthetic
  source 1..20: mol_type = other DNA
gagtccgagcagaagaagaa

SEQ ID NO: 3548 - DNA, 20 bp, synthetic construct
  misc_feature 1..20: note = Synthetic
  source 1..20: mol_type = other DNA
gtaacggcagacttctcctc

SEQ ID NO: 3549 - DNA, 22 bp, synthetic construct
  misc_feature 1..22: note = Synthetic
  source 1..22: mol_type = other DNA
tctgccatccgtgctcagtctg

SEQ ID NO: 3550 - DNA, 24 bp, synthetic construct
  misc_feature 1..24: note = Synthetic
  source 1..24: mol_type = other DNA
tctgccatcatcgtgctcagtctg

SEQ ID NO: 3551 - DNA, 26 bp, synthetic construct
  misc_feature 1..26: note = Synthetic
  source 1..26: mol_type = other DNA
tctgccatcaaagcgtgctcagtctg

SEQ ID NO: 3552 - DNA, 23 bp, synthetic construct
  misc_feature 1..23: note = Synthetic
  source 1..23: mol_type = other DNA
tctgccatgacgtgctcagtctg

SEQ ID NO: 3553 - DNA, 71 bp, synthetic construct; identical to SEQ ID NO: 3540
  misc_feature 1..71: note = Synthetic
  source 1..71: mol_type = other DNA

SEQ ID NO: 3554 - DNA, 29 bp, synthetic construct
  misc_feature 1..29: note = Synthetic
  source 1..29: mol_type = other DNA
aacgaacacctcatgtaatgactaagatg

SEQ ID NO: 3555 - DNA, 26 bp, synthetic construct
  misc_feature 1..26: note = Synthetic
  source 1..26: mol_type = other DNA
atgggagcccttgttcttctgctcgg

SEQ ID NO: 3556 - DNA, 26 bp, synthetic construct
  misc_feature 1..26: note = Synthetic
  source 1..26: mol_type = other DNA
atctgactcctgtggagaagtctgcc

SEQ ID NO: 3557 - DNA, 20 bp, synthetic construct
  misc_feature 1..20: note = Synthetic
  source 1..20: mol_type = other DNA
gatgtctgcaggccagatga

SEQ ID NO: 3558 - DNA, 20 bp, synthetic construct
  misc_feature 1..20: note = Synthetic
  source 1..20: mol_type = other DNA
gatgtctgcaggccagatga

SEQ ID NO: 3559 - DNA, 20 bp, synthetic construct
  misc_feature 1..20: note = Synthetic
  source 1..20: mol_type = other DNA
gatgtctgcaggccagatga

SEQ ID NO: 3560 - DNA, 20 bp, synthetic construct
  misc_feature 1..20: note = Synthetic
  source 1..20: mol_type = other DNA
gatgtctgcaggccagatga

SEQ ID NO: 3561 - DNA, 20 bp, synthetic construct
  misc_feature 1..20: note = Synthetic
  source 1..20: mol_type = other DNA
gatgtctgcaggccagatga

SEQ ID NO: 3562 - DNA, 20 bp, synthetic construct
  misc_feature 1..20: note = Synthetic
  source 1..20: mol_type = other DNA
gatgtctgcaggccagatga

SEQ ID NO: 3563 - DNA, 20 bp, synthetic construct
  misc_feature 1..20: note = Synthetic
  source 1..20: mol_type = other DNA
gatgtctgcaggccagatga

SEQ ID NO: 3564 - DNA, 20 bp, synthetic construct
  misc_feature 1..20: note = Synthetic
  source 1..20: mol_type = other DNA
gatgtctgcaggccagatga

SEQ ID NO: 3565 - DNA, 20 bp, synthetic construct
  misc_feature 1..20: note = Synthetic
  source 1..20: mol_type = other DNA
gatgtctgcaggccagatga

SEQ ID NO: 3566 - DNA, 20 bp, synthetic construct
  misc_feature 1..20: note = Synthetic
  source 1..20: mol_type = other DNA
gatgtctgcaggccagatga

SEQ ID NO: 3567 - DNA, 20 bp, synthetic construct
  misc_feature 1..20: note = Synthetic
  source 1..20: mol_type = other DNA
gatgtctgcaggccagatga

SEQ ID NO: 3568 - DNA, 20 bp, synthetic construct
  misc_feature 1..20: note = Synthetic
  source 1..20: mol_type = other DNA
gatgtctgcaggccagatga

SEQ ID NO: 3569 - DNA, 20 bp, synthetic construct
  misc_feature 1..20: note = Synthetic
  source 1..20: mol_type = other DNA
gatgtctgcaggccagatga

SEQ ID NO: 3570 - DNA, 20 bp, synthetic construct
  misc_feature 1..20: note = Synthetic
  source 1..20: mol_type = other DNA
gatgtctgcaggccagatga

SEQ ID NO: 3571 - DNA, 20 bp, synthetic construct
  misc_feature 1..20: note = Synthetic
  source 1..20: mol_type = other DNA
gatgtctgcaggccagatga

SEQ ID NO: 3572 - DNA, 20 bp, synthetic construct
  misc_feature 1..20: note = Synthetic
  source 1..20: mol_type = other DNA
gatgtctgcaggccagatga

SEQ ID NO: 3573 - DNA, 20 bp, synthetic construct
  misc_feature 1..20: note = Synthetic
  source 1..20: mol_type = other DNA
gatgtctgcaggccagatga

SEQ ID NO: 3574 - DNA, 20 bp, synthetic construct
  misc_feature 1..20: note = Synthetic
  source 1..20: mol_type = other DNA
gatgtctgcaggccagatga

SEQ ID NO: 3575 - DNA, 20 bp, synthetic construct
  misc_feature 1..20: note = Synthetic
  source 1..20: mol_type = other DNA
gatgtctgcaggccagatga

SEQ ID NO: 3576 - DNA, 20 bp, synthetic construct
  misc_feature 1..20: note = Synthetic
  source 1..20: mol_type = other DNA
gatgtctgcaggccagatga

SEQ ID NO: 3577 - DNA, 20 bp, synthetic construct
  misc_feature 1..20: note = Synthetic
  source 1..20: mol_type = other DNA
gatgtctgcaggccagatga

SEQ ID NO: 3578 - DNA, 20 bp, synthetic construct
  misc_feature 1..20: note = Synthetic
  source 1..20: mol_type = other DNA
gatgtctgcaggccagatga

SEQ ID NO: 3579 - DNA, 20 bp, synthetic construct
  misc_feature 1..20: note = Synthetic
  source 1..20: mol_type = other DNA
gatgtctgcaggccagatga

SEQ ID NO: 3580 - DNA, 20 bp, synthetic construct
  misc_feature 1..20: note = Synthetic
  source 1..20: mol_type = other DNA
gatgtctgcaggccagatga

SEQ ID NO: 3581 - DNA, 20 bp, synthetic construct
  misc_feature 1..20: note = Synthetic
  source 1..20: mol_type = other DNA
gattcctggtgccagaaaca

SEQ ID NO: 3582 - DNA, 20 bp, synthetic construct
  misc_feature 1..20: note = Synthetic
  source 1..20: mol_type = other DNA
gattcctggtgccagaaaca

SEQ ID NO: 3583 - DNA, 20 bp, synthetic construct
  misc_feature 1..20: note = Synthetic
  source 1..20: mol_type = other DNA
gattcctggtgccagaaaca

SEQ ID NO: 3584 - DNA, 20 bp, synthetic construct
  misc_feature 1..20: note = Synthetic
  source 1..20: mol_type = other DNA
gattcctggtgccagaaaca

SEQ ID NO: 3585 - DNA, 20 bp, synthetic construct
  misc_feature 1..20: note = Synthetic
  source 1..20: mol_type = other DNA
gattcctggtgccagaaaca

SEQ ID NO: 3586 - DNA, 20 bp, synthetic construct
  misc_feature 1..20: note = Synthetic
  source 1..20: mol_type = other DNA
gattcctggtgccagaaaca

SEQ ID NO: 3587 - DNA, 20 bp, synthetic construct
  misc_feature 1..20: note = Synthetic
  source 1..20: mol_type = other DNA
gattcctggtgccagaaaca

SEQ ID NO: 3588 - DNA, 20 bp, synthetic construct
  misc_feature 1..20: note = Synthetic
  source 1..20: mol_type = other DNA
gattcctggtgccagaaaca

SEQ ID NO: 3589 - DNA, 20 bp, synthetic construct
  misc_feature 1..20: note = Synthetic
  source 1..20: mol_type = other DNA
gattcctggtgccagaaaca

SEQ ID NO: 3590 - DNA, 20 bp, synthetic construct
  misc_feature 1..20: note = Synthetic
  source 1..20: mol_type = other DNA
gattcctggtgccagaaaca

SEQ ID NO: 3591 - DNA, 20 bp, synthetic construct
  misc_feature 1..20: note = Synthetic
  source 1..20: mol_type = other DNA
gattcctggtgccagaaaca

SEQ ID NO: 3592 - DNA, 20 bp, synthetic construct
  misc_feature 1..20: note = Synthetic
  source 1..20: mol_type = other DNA
gattcctggtgccagaaaca

SEQ ID NO: 3593 - DNA, 20 bp, synthetic construct
  misc_feature 1..20: note = Synthetic
  source 1..20: mol_type = other DNA
gattcctggtgccagaaaca

SEQ ID NO: 3594 - DNA, 20 bp, synthetic construct
  misc_feature 1..20: note = Synthetic
  source 1..20: mol_type = other DNA
gattcctggtgccagaaaca

SEQ ID NO: 3595 - DNA, 20 bp, synthetic construct
  misc_feature 1..20: note = Synthetic
  source 1..20: mol_type = other DNA
gattcctggtgccagaaaca

SEQ ID NO: 3596 - DNA, 20 bp, synthetic construct
  misc_feature 1..20: note = Synthetic
  source 1..20: mol_type = other DNA
gattcctggtgccagaaaca

SEQ ID NO: 3597 - DNA, 20 bp, synthetic construct
  misc_feature 1..20: note = Synthetic
  source 1..20: mol_type = other DNA
gattcctggtgccagaaaca

SEQ ID NO: 3598 - DNA, 20 bp, synthetic construct
  misc_feature 1..20: note = Synthetic
  source 1..20: mol_type = other DNA
gattcctggtgccagaaaca

SEQ ID NO: 3599 - DNA, 20 bp, synthetic construct
  misc_feature 1..20: note = Synthetic
  source 1..20: mol_type = other DNA
gattcctggtgccagaaaca

SEQ ID NO: 3600 - DNA, 20 bp, synthetic construct
  misc_feature 1..20: note = Synthetic
  source 1..20: mol_type = other DNA
gattcctggtgccagaaaca

SEQ ID NO: 3601 - DNA, 20 bp, synthetic construct
  misc_feature 1..20: note = Synthetic
  source 1..20: mol_type = other DNA
gattcctggtgccagaaaca

SEQ ID NO: 3602 - DNA, 20 bp, synthetic construct
  misc_feature 1..20: note = Synthetic
  source 1..20: mol_type = other DNA
gattcctggtgccagaaaca

SEQ ID NO: 3603 - DNA, 20 bp, synthetic construct
  misc_feature 1..20: note = Synthetic
  source 1..20: mol_type = other DNA
gattcctggtgccagaaaca

SEQ ID NO: 3604 - DNA, 20 bp, synthetic construct
  misc_feature 1..20: note = Synthetic
  source 1..20: mol_type = other DNA
gattcctggtgccagaaaca

SEQ ID NO: 3605 - DNA, 20 bp, synthetic construct
  misc_feature 1..20: note = Synthetic
  source 1..20: mol_type = other DNA
gcattttcaggaggaagcga

SEQ ID NO: 3606 - DNA, 20 bp, synthetic construct
  misc_feature 1..20: note = Synthetic
  source 1..20: mol_type = other DNA
gcattttcaggaggaagcga

SEQ ID NO: 3607 - DNA, 20 bp, synthetic construct
  misc_feature 1..20: note = Synthetic
  source 1..20: mol_type = other DNA
gcattttcaggaggaagcga

SEQ ID NO: 3608 - DNA, 20 bp, synthetic construct
  misc_feature 1..20: note = Synthetic
  source 1..20: mol_type = other DNA
gcattttcaggaggaagcga

SEQ ID NO: 3609 - DNA, 20 bp, synthetic construct
  misc_feature 1..20: note = Synthetic
  source 1..20: mol_type = other DNA
gcattttcaggaggaagcga

SEQ ID NO: 3610 - DNA, 20 bp, synthetic construct
  misc_feature 1..20: note = Synthetic
  source 1..20: mol_type = other DNA
gcattttcaggaggaagcga

SEQ ID NO: 3611 - DNA, 20 bp, synthetic construct
  misc_feature 1..20: note = Synthetic
  source 1..20: mol_type = other DNA
gcattttcaggaggaagcga

SEQ ID NO: 3612 - DNA, 20 bp, synthetic construct
  misc_feature 1..20: note = Synthetic
  source 1..20: mol_type = other DNA
gcattttcaggaggaagcga

SEQ ID NO: 3613 - DNA, 20 bp, synthetic construct
  misc_feature 1..20: note = Synthetic
  source 1..20: mol_type = other DNA
gcattttcaggaggaagcga

SEQ ID NO: 3614 - DNA, 20 bp, synthetic construct
  misc_feature 1..20: note = Synthetic
  source 1..20: mol_type = other DNA
gcattttcaggaggaagcga

SEQ ID NO: 3615 - DNA, 20 bp, synthetic construct
  misc_feature 1..20: note = Synthetic
  source 1..20: mol_type = other DNA
gcattttcaggaggaagcga

SEQ ID NO: 3616 - DNA, 20 bp, synthetic construct
  misc_feature 1..20: note = Synthetic
  source 1..20: mol_type = other DNA
gcattttcaggaggaagcga

SEQ ID NO: 3617 - DNA, 20 bp, synthetic construct
  misc_feature 1..20: note = Synthetic
  source 1..20: mol_type = other DNA
gcattttcaggaggaagcga

SEQ ID NO: 3618 - DNA, 20 bp, synthetic construct
  misc_feature 1..20: note = Synthetic
  source 1..20: mol_type = other DNA
gcattttcaggaggaagcga

SEQ ID NO: 3619 - DNA, 20 bp, synthetic construct
  misc_feature 1..20: note = Synthetic
  source 1..20: mol_type = other DNA
gcattttcaggaggaagcga

SEQ ID NO: 3620 - DNA, 20 bp, synthetic construct
  misc_feature 1..20: note = Synthetic
  source 1..20: mol_type = other DNA
gcattttcaggaggaagcga

SEQ ID NO: 3621 - DNA, 20 bp, synthetic construct
  misc_feature 1..20: note = Synthetic
  source 1..20: mol_type = other DNA
gcattttcaggaggaagcga

SEQ ID NO: 3622 - DNA, 20 bp, synthetic construct
  misc_feature 1..20: note = Synthetic
  source 1..20: mol_type = other DNA
gcattttcaggaggaagcga

SEQ ID NO: 3623 - DNA, 20 bp, synthetic construct
  misc_feature 1..20: note = Synthetic
  source 1..20: mol_type = other DNA
gcattttcaggaggaagcga

SEQ ID NO: 3624 - DNA, 20 bp, synthetic construct
  misc_feature 1..20: note = Synthetic
  source 1..20: mol_type = other DNA
gcattttcaggaggaagcga

SEQ ID NO: 3625 - DNA, 20 bp, synthetic construct
  misc_feature 1..20: note = Synthetic
  source 1..20: mol_type = other DNA
gcattttcaggaggaagcga

SEQ ID NO: 3626 - DNA, 20 bp, synthetic construct
  misc_feature 1..20: note = Synthetic
  source 1..20: mol_type = other DNA
gcattttcaggaggaagcga

SEQ ID NO: 3627 - DNA, 20 bp, synthetic construct
  misc_feature 1..20: note = Synthetic
  source 1..20: mol_type = other DNA
gcattttcaggaggaagcga

SEQ ID NO: 3628 - DNA, 44 bp, synthetic construct
  misc_feature 1..44: note = Synthetic
  source 1..44: mol_type = other DNA
ccctctgacaatgtgccatctggagcactcatctggcctgcaga

SEQ ID NO: 3629 - DNA, 43 bp, synthetic construct
  misc_feature 1..43: note = Synthetic
  source 1..43: mol_type = other DNA
cctctgacaatgtgccatctggagcactcatctggcctgcaga

SEQ ID NO: 3630 - DNA, 42 bp, synthetic construct
  misc_feature 1..42: note = Synthetic
  source 1..42: mol_type = other DNA
ctctgacaatgtgccatctggagcactcatctggcctgcaga

SEQ ID NO: 3631 - DNA, 41 bp, synthetic construct
  misc_feature 1..41: note = Synthetic
  source 1..41: mol_type = other DNA
tctgacaatgtgccatctggagcactcatctggcctgcaga

SEQ ID NO: 3632 - DNA, 40 bp, synthetic construct
  misc_feature 1..40: note = Synthetic
  source 1..40: mol_type = other DNA
ctgacaatgtgccatctggagcactcatctggcctgcaga

SEQ ID NO: 3633 - DNA, 39 bp, synthetic construct
  misc_feature 1..39: note = Synthetic
  source 1..39: mol_type = other DNA
tgacaatgtgccatctggagcactcatctggcctgcaga

SEQ ID NO: 3634 - DNA, 38 bp, synthetic construct
  misc_feature 1..38: note = Synthetic
  source 1..38: mol_type = other DNA
gacaatgtgccatctggagcactcatctggcctgcaga

SEQ ID NO: 3635 - DNA, 37 bp, synthetic construct
  misc_feature 1..37: note = Synthetic
  source 1..37: mol_type = other DNA
acaatgtgccatctggagcactcatctggcctgcaga

SEQ ID NO: 3636 - DNA, 36 bp, synthetic construct
  misc_feature 1..36: note = Synthetic
  source 1..36: mol_type = other DNA
caatgtgccatctggagcactcatctggcctgcaga

SEQ ID NO: 3637 - DNA, 35 bp, synthetic construct; identical to SEQ ID NO: 3394
  misc_feature 1..35: note = Synthetic
  source 1..35: mol_type = other DNA

SEQ ID NO: 3638 - DNA, 34 bp, synthetic construct
  misc_feature 1..34: note = Synthetic
  source 1..34: mol_type = other DNA
atgtgccatctggagcactcatctggcctgcaga

SEQ ID NO: 3639 - DNA, 33 bp, synthetic construct
  misc_feature 1..33: note = Synthetic
  source 1..33: mol_type = other DNA
tgtgccatctggagcactcatctggcctgcaga

SEQ ID NO: 3640 - DNA, 32 bp, synthetic construct
  misc_feature 1..32: note = Synthetic
  source 1..32: mol_type = other DNA
gtgccatctggagcactcatctggcctgcaga

SEQ ID NO: 3641 - DNA, 31 bp, synthetic construct
  misc_feature 1..31: note = Synthetic
  source 1..31: mol_type = other DNA
tgccatctggagcactcatctggcctgcaga

SEQ ID NO: 3642 - DNA, 30 bp, synthetic construct
  misc_feature 1..30: note = Synthetic
  source 1..30: mol_type = other DNA
gccatctggagcactcatctggcctgcaga

SEQ ID NO: 3643 - DNA, 29 bp, synthetic construct
  misc_feature 1..29: note = Synthetic
  source 1..29: mol_type = other DNA
ccatctggagcactcatctggcctgcaga

SEQ ID NO: 3644 - DNA, 28 bp, synthetic construct
  misc_feature 1..28: note = Synthetic
  source 1..28: mol_type = other DNA
catctggagcactcatctggcctgcaga

SEQ ID NO: 3645 - DNA, 27 bp, synthetic construct
  misc_feature 1..27: note = Synthetic
  source 1..27: mol_type = other DNA
atctggagcactcatctggcctgcaga

SEQ ID NO: 3646 - DNA, 26 bp, synthetic construct
  misc_feature 1..26: note = Synthetic
  source 1..26: mol_type = other DNA
tctggagcactcatctggcctgcaga

SEQ ID NO: 3647 - DNA, 25 bp, synthetic construct
  misc_feature 1..25: note = Synthetic
  source 1..25: mol_type = other DNA
ctggagcactcatctggcctgcaga

SEQ ID NO: 3648 - DNA, 24 bp, synthetic construct
  misc_feature 1..24: note = Synthetic
  source 1..24: mol_type = other DNA
tggagcactcatctggcctgcaga

SEQ ID NO: 3649 - DNA, 23 bp, synthetic construct
  misc_feature 1..23: note = Synthetic
  source 1..23: mol_type = other DNA
ggagcactcatctggcctgcaga

SEQ ID NO: 3650 - DNA, 22 bp, synthetic construct
  misc_feature 1..22: note = Synthetic
  source 1..22: mol_type = other DNA
gagcactcatctggcctgcaga

SEQ ID NO: 3651 - DNA, 21 bp, synthetic construct
  misc_feature 1..21: note = Synthetic
  source 1..21: mol_type = other DNA
agcactcatctggcctgcaga

SEQ ID NO: 3652 - DNA, 44 bp, synthetic construct
  misc_feature 1..44: note = Synthetic
  source 1..44: mol_type = other DNA
aggactagttctgccctcccgtcaccactgtttctggcaccagg

SEQ ID NO: 3653 - DNA, 43 bp, synthetic construct
  misc_feature 1..43: note = Synthetic
  source 1..43: mol_type = other DNA
ggactagttctgccctcccgtcaccactgtttctggcaccagg

SEQ ID NO: 3654 - DNA, 42 bp, synthetic construct
  misc_feature 1..42: note = Synthetic
  source 1..42: mol_type = other DNA
gactagttctgccctcccgtcaccactgtttctggcaccagg

SEQ ID NO: 3655 - DNA, 41 bp, synthetic construct
  misc_feature 1..41: note = Synthetic
  source 1..41: mol_type = other DNA
actagttctgccctcccgtcaccactgtttctggcaccagg

SEQ ID NO: 3656 - DNA, 40 bp, synthetic construct
  misc_feature 1..40: note = Synthetic
  source 1..40: mol_type = other DNA
ctagttctgccctcccgtcaccactgtttctggcaccagg

SEQ ID NO: 3657 - DNA, 39 bp, synthetic construct
  misc_feature 1..39: note = Synthetic
  source 1..39: mol_type = other DNA
tagttctgccctcccgtcaccactgtttctggcaccagg

SEQ ID NO: 3658 - DNA, 38 bp, synthetic construct
  misc_feature 1..38: note = Synthetic
  source 1..38: mol_type = other DNA
agttctgccctcccgtcaccactgtttctggcaccagg

SEQ ID NO: 3659 - DNA, 37 bp, synthetic construct
  misc_feature 1..37: note = Synthetic
  source 1..37: mol_type = other DNA
gttctgccctcccgtcaccactgtttctggcaccagg

SEQ ID NO: 3660 - DNA, 36 bp, synthetic construct
  misc_feature 1..36: note = Synthetic
  source 1..36: mol_type = other DNA
ttctgccctcccgtcaccactgtttctggcaccagg

SEQ ID NO: 3661 - DNA, 35 bp, synthetic construct
  misc_feature 1..35: note = Synthetic
  source 1..35: mol_type = other DNA
tctgccctcccgtcaccactgtttctggcaccagg

SEQ ID NO: 3662 - DNA, 34 bp, synthetic construct
  misc_feature 1..34: note = Synthetic
  source 1..34: mol_type = other DNA
ctgccctcccgtcaccactgtttctggcaccagg

SEQ ID NO: 3663 - DNA, 33 bp, synthetic construct
  misc_feature 1..33: note = Synthetic
  source 1..33: mol_type = other DNA
tgccctcccgtcaccactgtttctggcaccagg

SEQ ID NO: 3664 - DNA, 32 bp, synthetic construct
  misc_feature 1..32: note = Synthetic
  source 1..32: mol_type = other DNA
gccctcccgtcaccactgtttctggcaccagg

SEQ ID NO: 3665 - DNA, 31 bp, synthetic construct
  misc_feature 1..31: note = Synthetic
  source 1..31: mol_type = other DNA
ccctcccgtcaccactgtttctggcaccagg

SEQ ID NO: 3666 - DNA, 30 bp, synthetic construct
  misc_feature 1..30: note = Synthetic
  source 1..30: mol_type = other DNA
cctcccgtcaccactgtttctggcaccagg

SEQ ID NO: 3667 - DNA, 29 bp, synthetic construct
  misc_feature 1..29: note = Synthetic
  source 1..29: mol_type = other DNA
ctcccgtcaccactgtttctggcaccagg

SEQ ID NO: 3668 - DNA, 28 bp, synthetic construct
  misc_feature 1..28: note = Synthetic
  source 1..28: mol_type = other DNA
tcccgtcaccactgtttctggcaccagg

SEQ ID NO: 3669 - DNA, 27 bp, synthetic construct
  misc_feature 1..27: note = Synthetic
  source 1..27: mol_type = other DNA
cccgtcaccactgtttctggcaccagg

SEQ ID NO: 3670 - DNA, 26 bp, synthetic construct
  misc_feature 1..26: note = Synthetic
  source 1..26: mol_type = other DNA
ccgtcaccactgtttctggcaccagg

SEQ ID NO: 3671 - DNA, 25 bp, synthetic construct
  misc_feature 1..25: note = Synthetic
  source 1..25: mol_type = other DNA
cgtcaccactgtttctggcaccagg

SEQ ID NO: 3672 - DNA, 24 bp, synthetic construct
  misc_feature 1..24: note = Synthetic
  source 1..24: mol_type = other DNA
gtcaccactgtttctggcaccagg

SEQ ID NO: 3673 - DNA, 23 bp, synthetic construct
  misc_feature 1..23: note = Synthetic
  source 1..23: mol_type = other DNA
tcaccactgtttctggcaccagg

SEQ ID NO: 3674 - DNA, 22 bp, synthetic construct
  misc_feature 1..22: note = Synthetic
  source 1..22: mol_type = other DNA
caccactgtttctggcaccagg

SEQ ID NO: 3675 - DNA, 21 bp, synthetic construct
  misc_feature 1..21: note = Synthetic
  source 1..21: mol_type = other DNA
accactgtttctggcaccagg

SEQ ID NO: 3676 - DNA, 46 bp, synthetic construct
  misc_feature 1..46: note = Synthetic
  source 1..46: mol_type = other DNA
aatgactcaaatatgctgtctgaagcaatcgcttcctcctgaaaat

SEQ ID NO: 3677 - DNA, 45 bp, synthetic construct
  misc_feature 1..45: note = Synthetic
  source 1..45: mol_type = other DNA
atgactcaaatatgctgtctgaagcaatcgcttcctcctgaaaat

SEQ ID NO: 3678 - DNA, 44 bp, synthetic construct
  misc_feature 1..44: note = Synthetic
  source 1..44: mol_type = other DNA
tgactcaaatatgctgtctgaagcaatcgcttcctcctgaaaat

SEQ ID NO: 3679 - DNA, 43 bp, synthetic construct
  misc_feature 1..43: note = Synthetic
  source 1..43: mol_type = other DNA
gactcaaatatgctgtctgaagcaatcgcttcctcctgaaaat

SEQ ID NO: 3680 - DNA, 42 bp, synthetic construct
  misc_feature 1..42: note = Synthetic
  source 1..42: mol_type = other DNA
actcaaatatgctgtctgaagcaatcgcttcctcctgaaaat

SEQ ID NO: 3681 - DNA, 41 bp, synthetic construct
  misc_feature 1..41: note = Synthetic
  source 1..41: mol_type = other DNA
ctcaaatatgctgtctgaagcaatcgcttcctcctgaaaat

SEQ ID NO: 3682 - DNA, 40 bp, synthetic construct
  misc_feature 1..40: note = Synthetic
  source 1..40: mol_type = other DNA
tcaaatatgctgtctgaagcaatcgcttcctcctgaaaat

SEQ ID NO: 3683 - DNA, 39 bp, synthetic construct
  misc_feature 1..39: note = Synthetic
  source 1..39: mol_type = other DNA
caaatatgctgtctgaagcaatcgcttcctcctgaaaat

SEQ ID NO: 3684 - DNA, 38 bp, synthetic construct
  misc_feature 1..38: note = Synthetic
  source 1..38: mol_type = other DNA
aaatatgctgtctgaagcaatcgcttcctcctgaaaat

SEQ ID NO: 3685 - DNA, 37 bp, synthetic construct
  misc_feature 1..37: note = Synthetic
  source 1..37: mol_type = other DNA
aatatgctgtctgaagcaatcgcttcctcctgaaaat

SEQ ID NO: 3686 - DNA, 36 bp, synthetic construct
  misc_feature 1..36: note = Synthetic
  source 1..36: mol_type = other DNA
atatgctgtctgaagcaatcgcttcctcctgaaaat

SEQ ID NO: 3687 - DNA, 35 bp, synthetic construct
  misc_feature 1..35: note = Synthetic
  source 1..35: mol_type = other DNA
tatgctgtctgaagcaatcgcttcctcctgaaaat

SEQ ID NO: 3688 - DNA, 34 bp, synthetic construct
  misc_feature 1..34: note = Synthetic
  source 1..34: mol_type = other DNA
atgctgtctgaagcaatcgcttcctcctgaaaat

SEQ ID NO: 3689 - DNA, 33 bp, synthetic construct
  misc_feature 1..33: note = Synthetic
  source 1..33: mol_type = other DNA
tgctgtctgaagcaatcgcttcctcctgaaaat

SEQ ID NO: 3690 - DNA, 32 bp, synthetic construct
  misc_feature 1..32: note = Synthetic
  source 1..32: mol_type = other DNA
gctgtctgaagcaatcgcttcctcctgaaaat

SEQ ID NO: 3691 - DNA, 31 bp, synthetic construct
  misc_feature 1..31: note = Synthetic
  source 1..31: mol_type = other DNA
ctgtctgaagcaatcgcttcctcctgaaaat

SEQ ID NO: 3692 - DNA, 30 bp, synthetic construct; identical to SEQ ID NO: 3385
  misc_feature 1..30: note = Synthetic
  source 1..30: mol_type = other DNA

SEQ ID NO: 3693 - DNA, 29 bp, synthetic construct
  misc_feature 1..29: note = Synthetic
  source 1..29: mol_type = other DNA
gtctgaagcaatcgcttcctcctgaaaat

SEQ ID NO: 3694 - DNA, 28 bp, synthetic construct
  misc_feature 1..28: note = Synthetic
  source 1..28: mol_type = other DNA
tctgaagcaatcgcttcctcctgaaaat

SEQ ID NO: 3695 - DNA, 27 bp, synthetic construct
  misc_feature 1..27: note = Synthetic
  source 1..27: mol_type = other DNA
ctgaagcaatcgcttcctcctgaaaat

SEQ ID NO: 3696 - DNA, 26 bp, synthetic construct
  misc_feature 1..26: note = Synthetic
  source 1..26: mol_type = other DNA
tgaagcaatcgcttcctcctgaaaat

SEQ ID NO: 3697 - DNA, 25 bp, synthetic construct
  misc_feature 1..25: note = Synthetic
  source 1..25: mol_type = other DNA
gaagcaatcgcttcctcctgaaaat

SEQ ID NO: 3698 - DNA, 24 bp, synthetic construct
  misc_feature 1..24: note = Synthetic
  source 1..24: mol_type = other DNA
aagcaatcgcttcctcctgaaaat

SEQ ID NO: 3699 - DNA, 20 bp, synthetic construct
  misc_feature 1..20: note = Synthetic
  source 1..20: mol_type = other DNA
gtaacggcagacttctccac

SEQ ID NO: 3700 - DNA, 21 bp, synthetic construct
  misc_feature 1..21: note = Synthetic
  source 1..21: mol_type = other DNA
gcatggtgcacctgactcctg

SEQ ID NO: 3701 - DNA, 21 bp, synthetic construct
  misc_feature 1..21: note = Synthetic
  source 1..21: mol_type = other DNA
gcatggtgcacctgactcctg

SEQ ID NO: 3702 - DNA, 21 bp, synthetic construct
  misc_feature 1..21: note = Synthetic
  source 1..21: mol_type = other DNA
gcatggtgcacctgactcctg

SEQ ID NO: 3703 - DNA, 21 bp, synthetic construct
  misc_feature 1..21: note = Synthetic
  source 1..21: mol_type = other DNA
gcatggtgcacctgactcctg

SEQ ID NO: 3704 - DNA, 21 bp, synthetic construct
  misc_feature 1..21: note = Synthetic
  source 1..21: mol_type = other DNA
gcatggtgcacctgactcctg

SEQ ID NO: 3705 - DNA, 21 bp, synthetic construct
  misc_feature 1..21: note = Synthetic
  source 1..21: mol_type = other DNA
gcatggtgcacctgactcctg

SEQ ID NO: 3706 - DNA, 21 bp, synthetic construct
  misc_feature 1..21: note = Synthetic
  source 1..21: mol_type = other DNA
gcatggtgcacctgactcctg

SEQ ID NO: 3707 - DNA, 21 bp, synthetic construct
  misc_feature 1..21: note = Synthetic
  source 1..21: mol_type = other DNA
gcatggtgcacctgactcctg

SEQ ID NO: 3708 - DNA, 21 bp, synthetic construct
  misc_feature 1..21: note = Synthetic
  source 1..21: mol_type = other DNA
gcatggtgcacctgactcctg

SEQ ID NO: 3709 - DNA, 21 bp, synthetic construct
  misc_feature 1..21: note = Synthetic
  source 1..21: mol_type = other DNA
gcatggtgcacctgactcctg

SEQ ID NO: 3710 - DNA, 21 bp, synthetic construct
  misc_feature 1..21: note = Synthetic
  source 1..21: mol_type = other DNA
gcatggtgcacctgactcctg

SEQ ID NO: 3711 - DNA, 21 bp, synthetic construct
  misc_feature 1..21: note = Synthetic
  source 1..21: mol_type = other DNA
gcatggtgcacctgactcctg

SEQ ID NO: 3712 - DNA, 21 bp, synthetic construct
  misc_feature 1..21: note = Synthetic
  source 1..21: mol_type = other DNA
gcatggtgcacctgactcctg

SEQ ID NO: 3713 - DNA, 20 bp, synthetic construct
  misc_feature 1..20: note = Synthetic
  source 1..20: mol_type = other DNA
atccttccagtcagggccat

SEQ ID NO: 3714 - DNA, 20 bp, synthetic construct
  misc_feature 1..20: note = Synthetic
  source 1..20: mol_type = other DNA
atccttccagtcagggccat

SEQ ID NO: 3715 - DNA, 20 bp, synthetic construct
  misc_feature 1..20: note = Synthetic
  source 1..20: mol_type = other DNA
atccttccagtcagggccat

SEQ ID NO: 3716 - DNA, 20 bp, synthetic construct
  misc_feature 1..20: note = Synthetic
  source 1..20: mol_type = other DNA
atccttccagtcagggccat

SEQ ID NO: 3717 - DNA, 20 bp, synthetic construct
  misc_feature 1..20: note = Synthetic
  source 1..20: mol_type = other DNA
atccttccagtcagggccat

SEQ ID NO: 3718 - DNA, 20 bp, synthetic construct
  misc_feature 1..20: note = Synthetic
  source 1..20: mol_type = other DNA
atccttccagtcagggccat

SEQ ID NO: 3719 - DNA, 20 bp, synthetic construct
  misc_feature 1..20: note = Synthetic
  source 1..20: mol_type = other DNA
atccttccagtcagggccat

SEQ ID NO: 3720 - DNA, 20 bp, synthetic construct
  misc_feature 1..20: note = Synthetic
  source 1..20: mol_type = other DNA
atccttccagtcagggccat

SEQ ID NO: 3721 - DNA, 20 bp, synthetic construct
  misc_feature 1..20: note = Synthetic
  source 1..20: mol_type = other DNA
atccttccagtcagggccat

SEQ ID NO: 3722 - DNA, 20 bp, synthetic construct
  misc_feature 1..20: note = Synthetic
  source 1..20: mol_type = other DNA
atccttccagtcagggccat

SEQ ID NO: 3723 - DNA, 20 bp, synthetic construct
  misc_feature 1..20: note = Synthetic
  source 1..20: mol_type = other DNA
atccttccagtcagggccat

SEQ ID NO: 3724 - DNA, 20 bp, synthetic construct
  misc_feature 1..20: note = Synthetic
  source 1..20: mol_type = other DNA
atccttccagtcagggccat

SEQ ID NO: 3725 - DNA, 20 bp, synthetic construct
  misc_feature 1..20: note = Synthetic
  source 1..20: mol_type = other DNA
atccttccagtcagggccat

SEQ ID NO: 3726 - DNA, 20 bp, synthetic construct
  misc_feature 1..20: note = Synthetic
  source 1..20: mol_type = other DNA
atccttccagtcagggccat

SEQ ID NO: 3727 - DNA, 20 bp, synthetic construct
  misc_feature 1..20: note = Synthetic
  source 1..20: mol_type = other DNA
atccttccagtcagggccat

SEQ ID NO: 3728 - DNA, 20 bp, synthetic construct
  misc_feature 1..20: note = Synthetic
  source 1..20: mol_type = other DNA
atccttccagtcagggccat

SEQ ID NO: 3729 - DNA, 20 bp, synthetic construct
  misc_feature 1..20: note = Synthetic
  source 1..20: mol_type = other DNA
atccttccagtcagggccat

SEQ ID NO: 3730 - DNA, 20 bp, synthetic construct
  misc_feature 1..20: note = Synthetic
  source 1..20: mol_type = other DNA
atccttccagtcagggccat

SEQ ID NO: 3731 - DNA, 20 bp, synthetic construct
  misc_feature 1..20: note = Synthetic
  source 1..20: mol_type = other DNA
atccttccagtcagggccat

SEQ ID NO: 3732 - DNA, 20 bp, synthetic construct
  misc_feature 1..20: note = Synthetic
  source 1..20: mol_type = other DNA
atccttccagtcagggccat

SEQ ID NO: 3733 - DNA, 20 bp, synthetic construct
  misc_feature 1..20: note = Synthetic
  source 1..20: mol_type = other DNA
atccttccagtcagggccat

SEQ ID NO: 3734 - DNA, 20 bp, synthetic construct
  misc_feature 1..20: note = Synthetic
  source 1..20: mol_type = other DNA
atccttccagtcagggccat

SEQ ID NO: 3735 - DNA, 20 bp, synthetic construct
  misc_feature 1..20: note = Synthetic
  source 1..20: mol_type = other DNA
atccttccagtcagggccat

SEQ ID NO: 3736 - DNA, 20 bp, synthetic construct
  misc_feature 1..20: note = Synthetic
  source 1..20: mol_type = other DNA
atccttccagtcagggccat

SEQ ID NO: 3737 - DNA, 20 bp, synthetic construct
  misc_feature 1..20: note = Synthetic
  source 1..20: mol_type = other DNA
atccttccagtcagggccat

SEQ ID NO: 3738 - DNA, 20 bp, synthetic construct
  misc_feature 1..20: note = Synthetic
  source 1..20: mol_type = other DNA
atccttccagtcagggccat

SEQ ID NO: 3739 - DNA, 20 bp, synthetic construct
  misc_feature 1..20: note = Synthetic
  source 1..20: mol_type = other DNA
atccttccagtcagggccat

SEQ ID NO: 3740 - DNA, 20 bp, synthetic construct
  misc_feature 1..20: note = Synthetic
  source 1..20: mol_type = other DNA
atccttccagtcagggccat

SEQ ID NO: 3741 - DNA, 20 bp, synthetic construct
  misc_feature 1..20: note = Synthetic
  source 1..20: mol_type = other DNA
atccttccagtcagggccat

SEQ ID NO: 3742 - DNA, 20 bp, synthetic construct
  misc_feature 1..20: note = Synthetic
  source 1..20: mol_type = other DNA
atccttccagtcagggccat

SEQ ID NO: 3743 - DNA, 20 bp, synthetic construct
  misc_feature 1..20: note = Synthetic
  source 1..20: mol_type = other DNA
atccttccagtcagggccat

SEQ ID NO: 3744 - DNA, 20 bp, synthetic construct
  misc_feature 1..20: note = Synthetic
  source 1..20: mol_type = other DNA
atccttccagtcagggccat

SEQ ID NO: 3745 - DNA, 20 bp, synthetic construct
  misc_feature 1..20: note = Synthetic
  source 1..20: mol_type = other DNA
atccttccagtcagggccat

SEQ ID NO: 3746 - DNA, 20 bp, synthetic construct
  misc_feature 1..20: note = Synthetic
  source 1..20: mol_type = other DNA
atccttccagtcagggccat

SEQ ID NO: 3747 - DNA, 20 bp, synthetic construct
  misc_feature 1..20: note = Synthetic
  source 1..20: mol_type = other DNA
atccttccagtcagggccat

SEQ ID NO: 3748 - DNA, 20 bp, synthetic construct
  misc_feature 1..20: note = Synthetic
  source 1..20: mol_type = other DNA
atccttccagtcagggccat

SEQ ID NO: 3749 - DNA, 20 bp, synthetic construct
  misc_feature 1..20: note = Synthetic
  source 1..20: mol_type = other DNA
atccttccagtcagggccat

SEQ ID NO: 3750 - DNA, 20 bp, synthetic construct
  misc_feature 1..20: note = Synthetic
  source 1..20: mol_type = other DNA
atccttccagtcagggccat

SEQ ID NO: 3751 - DNA, 20 bp, synthetic construct
  misc_feature 1..20: note = Synthetic
  source 1..20: mol_type = other DNA
atccttccagtcagggccat

SEQ ID NO: 3752 - DNA, 20 bp, synthetic construct
  misc_feature 1..20: note = Synthetic
  source 1..20: mol_type = other DNA
atccttccagtcagggccat

SEQ ID NO: 3753 - DNA, 20 bp, synthetic construct
  misc_feature 1..20: note = Synthetic
  source 1..20: mol_type = other DNA
atccttccagtcagggccat

SEQ ID NO: 3754 - DNA, 20 bp, synthetic construct
  misc_feature 1..20: note = Synthetic
  source 1..20: mol_type = other DNA
atccttccagtcagggccat

SEQ ID NO: 3755 - DNA, 27 bp, synthetic construct
  misc_feature 1..27: note = Synthetic
  source 1..27: mol_type = other DNA
agacttctcctcaggagtcaggtgcac

SEQ ID NO: 3756 - DNA, 27 bp, synthetic construct
  misc_feature 1..27: note = Synthetic
  source 1..27: mol_type = other DNA
agacttctcttcaggagtcaggtgcac

SEQ ID NO: 3757 - DNA, 34 bp, synthetic construct
  misc_feature 1..34: note = Synthetic
  source 1..34: mol_type = other DNA
taacggcagacttctcctcaggagtcaggtgcac

SEQ ID NO: 3758 - DNA, 32 bp, synthetic construct
  misc_feature 1..32: note = Synthetic
  source 1..32: mol_type = other DNA
acggcagacttctcctcaggagtcaggtgcac

SEQ ID NO: 3759 - DNA, 30 bp, synthetic construct
  misc_feature 1..30: note = Synthetic
  source 1..30: mol_type = other DNA
ggcagacttctcctcaggagtcaggtgcac

SEQ ID NO: 3760 - DNA, 29 bp, synthetic construct
  misc_feature 1..29: note = Synthetic
  source 1..29: mol_type = other DNA
gcagacttctcctcaggagtcaggtgcac

SEQ ID NO: 3761 - DNA, 26 bp, synthetic construct
  misc_feature 1..26: note = Synthetic
  source 1..26: mol_type = other DNA
gacttctcctcaggagtcaggtgcac

SEQ ID NO: 3762 - DNA, 25 bp, synthetic construct
  misc_feature 1..25: note = Synthetic
  source 1..25: mol_type = other DNA
acttctcctcaggagtcaggtgcac

SEQ ID NO: 3763 - DNA, 33 bp, synthetic construct
  misc_feature 1..33: note = Synthetic
  source 1..33: mol_type = other DNA
taacggcagacttctcctcaggagtcaggtgca

SEQ ID NO: 3764 - DNA, 31 bp, synthetic construct
  misc_feature 1..31: note = Synthetic
  source 1..31: mol_type = other DNA
acggcagacttctcctcaggagtcaggtgca

SEQ ID NO: 3765 - DNA, 29 bp, synthetic construct
  misc_feature 1..29: note = Synthetic
  source 1..29: mol_type = other DNA
ggcagacttctcctcaggagtcaggtgca

SEQ ID NO: 3766 - DNA, 28 bp, synthetic construct
  misc_feature 1..28: note = Synthetic
  source 1..28: mol_type = other DNA
gcagacttctcctcaggagtcaggtgca

SEQ ID NO: 3767 - DNA, 25 bp, synthetic construct
  misc_feature 1..25: note = Synthetic
  source 1..25: mol_type = other DNA
gacttctcctcaggagtcaggtgca

SEQ ID NO: 3768 - DNA, 24 bp, synthetic construct
  misc_feature 1..24: note = Synthetic
  source 1..24: mol_type = other DNA
acttctcctcaggagtcaggtgca

SEQ ID NO: 3769 - DNA, 23 bp, synthetic construct
  misc_feature 1..23: note = Synthetic
  source 1..23: mol_type = other DNA
atatcttatggccctgactggaa

SEQ ID NO: 3770 - DNA, 24 bp, synthetic construct
  misc_feature 1..24: note = Synthetic
  source 1..24: mol_type = other DNA
tatatcttatggccctgactggaa

SEQ ID NO: 3771 - DNA, 25 bp, synthetic construct
  misc_feature 1..25: note = Synthetic
  source 1..25: mol_type = other DNA
gtatatcttatggccctgactggaa

SEQ ID NO: 3772 - DNA, 28 bp, synthetic construct
  misc_feature 1..28: note = Synthetic
  source 1..28: mol_type = other DNA
accgtatatcttatggccctgactggaa

SEQ ID NO: 3773 - DNA, 29 bp, synthetic construct
  misc_feature 1..29: note = Synthetic
  source 1..29: mol_type = other DNA
aaccgtatatcttatggccctgactggaa

SEQ ID NO: 3774 - DNA, 30 bp, synthetic construct
  misc_feature 1..30: note = Synthetic
  source 1..30: mol_type = other DNA
gaaccgtatatcttatggccctgactggaa

SEQ ID NO: 3775 - DNA, 31 bp, synthetic construct
  misc_feature 1..31: note = Synthetic
  source 1..31: mol_type = other DNA
tgaaccgtatatcttatggccctgactggaa

SEQ ID NO: 3776 - DNA, 19 bp, synthetic construct
  misc_feature 1..19: note = Synthetic
  source 1..19: mol_type = other DNA
atatcttatggccctgact

SEQ ID NO: 3777 - DNA, 20 bp, synthetic construct
  misc_feature 1..20: note = Synthetic
  source 1..20: mol_type = other DNA
tatatcttatggccctgact

SEQ ID NO: 3778 - DNA, 21 bp, synthetic construct
  misc_feature 1..21: note = Synthetic
  source 1..21: mol_type = other DNA
gtatatcttatggccctgact

SEQ ID NO: 3779 - DNA, 24 bp, synthetic construct
  misc_feature 1..24: note = Synthetic
  source 1..24: mol_type = other DNA
accgtatatcttatggccctgact

SEQ ID NO: 3780 - DNA, 25 bp, synthetic construct
  misc_feature 1..25: note = Synthetic
  source 1..25: mol_type = other DNA
aaccgtatatcttatggccctgact

SEQ ID NO: 3781 - DNA, 26 bp, synthetic construct
  misc_feature 1..26: note = Synthetic
  source 1..26: mol_type = other DNA
gaaccgtatatcttatggccctgact

SEQ ID NO: 3782 - DNA, 27 bp, synthetic construct
  misc_feature 1..27: note = Synthetic
  source 1..27: mol_type = other DNA
tgaaccgtatatcttatggccctgact

SEQ ID NO: 3783 - DNA, 26 bp, synthetic construct
  misc_feature 1..26: note = Synthetic
  source 1..26: mol_type = other DNA
tgaaccgtatatcttatggccctgac

SEQ ID NO: 3784 - DNA, 28 bp, synthetic construct
  misc_feature 1..28: note = Synthetic
  source 1..28: mol_type = other DNA
tgaaccgtatatcttatggccctgactg

SEQ ID NO: 3785 - DNA, 29 bp, synthetic construct
  misc_feature 1..29: note = Synthetic
  source 1..29: mol_type = other DNA
tgaaccgtatatcttatggccctgactgg

SEQ ID NO: 3786 - DNA, 30 bp, synthetic construct
  misc_feature 1..30: note = Synthetic
  source 1..30: mol_type = other DNA
tgaaccgtatatcttatggccctgactgga

SEQ ID NO: 3787 - DNA, 31 bp, synthetic construct; identical to SEQ ID NO: 3775
  misc_feature 1..31: note = Synthetic
  source 1..31: mol_type = other DNA

SEQ ID NO: 3788 - DNA, 32 bp, synthetic construct
  misc_feature 1..32: note = Synthetic
  source 1..32: mol_type = other DNA
tgaaccgtatatcttatggccctgactggaag

SEQ ID NO: 3789 - DNA, 33 bp, synthetic construct
  misc_feature 1..33: note = Synthetic
  source 1..33: mol_type = other DNA
tgaaccgtatatcttatggccctgactggaagg

SEQ ID NO: 3790 - DNA, 30 bp, synthetic construct
  misc_feature 1..30: note = Synthetic
  source 1..30: mol_type = other DNA
acctgaaccgtatatcttatggccctgact

SEQ ID NO: 3791 - DNA, 31 bp, synthetic construct
  misc_feature 1..31: note = Synthetic
  source 1..31: mol_type = other DNA
tacctgaaccgtatatcttatggccctgact

SEQ ID NO: 3792 - DNA, 32 bp, synthetic construct; identical to SEQ ID NO: 3533
  misc_feature 1..32: note = Synthetic
  source 1..32: mol_type = other DNA

SEQ ID NO: 3793 - DNA, 33 bp, synthetic construct
  misc_feature 1..33: note = Synthetic
  source 1..33: mol_type = other DNA
ggtacctgaaccgtatatcttatggccctgact

SEQ ID NO: 3794 - DNA, 34 bp, synthetic construct
  misc_feature 1..34: note = Synthetic
  source 1..34: mol_type = other DNA
tggtacctgaaccgtatatcttatggccctgact

SEQ ID NO: 3795 - DNA, 34 bp, synthetic construct
  misc_feature 1..34: note = Synthetic
  source 1..34: mol_type = other DNA
acctgaaccgtatatcctatggccctgactggaa

SEQ ID NO: 3796 - DNA, 28 bp, synthetic construct
  misc_feature 1..28: note = Synthetic
  source 1..28: mol_type = other DNA
accgtatatcctatggccctgactggaa

SEQ ID NO: 3797 - DNA, 36 bp, synthetic construct
  misc_feature 1..36: note = Synthetic
  source 1..36: mol_type = other DNA
acctgaaccgtatatcctatggccctgactggaagg

SEQ ID NO: 3798 - DNA, 35 bp, synthetic construct
  misc_feature 1..35: note = Synthetic
  source 1..35: mol_type = other DNA
acctgaaccgtatatcctatggccctgactggaag

SEQ ID NO: 3799 - DNA, 33 bp, synthetic construct
  misc_feature 1..33: note = Synthetic
  source 1..33: mol_type = other DNA
acctgaaccgtatatcctatggccctgactgga

SEQ ID NO: 3800 - DNA, 32 bp, synthetic construct
  misc_feature 1..32: note = Synthetic
  source 1..32: mol_type = other DNA
acctgaaccgtatatcctatggccctgactgg

SEQ ID NO: 3801 - DNA, 31 bp, synthetic construct; identical to SEQ ID NO: 3532
  misc_feature 1..31: note = Synthetic
  source 1..31: mol_type = other DNA

SEQ ID NO: 3802 - DNA, 29 bp, synthetic construct
  misc_feature 1..29: note = Synthetic
  source 1..29: mol_type = other DNA
aaccgtatatcctatggccctgactggaa

SEQ ID NO: 3803 - DNA, 31 bp, synthetic construct
  misc_feature 1..31: note = Synthetic
  source 1..31: mol_type = other DNA
tgaaccgtatatcctatggccctgactggaa

SEQ ID NO: 3804 - DNA, 35 bp, synthetic construct
  misc_feature 1..35: note = Synthetic
  source 1..35: mol_type = other DNA
tacctgaaccgtatatcctatggccctgactggaa

SEQ ID NO: 3805 - DNA, 38 bp, synthetic construct
  misc_feature 1..38: note = Synthetic
  source 1..38: mol_type = other DNA
tggtacctgaaccgtatatcctatggccctgactggaa

SEQ ID NO: 3806 - DNA, 36 bp, synthetic construct
  misc_feature 1..36: note = Synthetic
  source 1..36: mol_type = other DNA
gtacctgaaccgtatatcctatggccctgactggaa

SEQ ID NO: 3807 - DNA, 26 bp, synthetic construct
  misc_feature 1..26: note = Synthetic
  source 1..26: mol_type = other DNA
aaccgtatatcctatggccctgactg

SEQ ID NO: 3808 - DNA, 28 bp, synthetic construct
  misc_feature 1..28: note = Synthetic
  source 1..28: mol_type = other DNA
tgaaccgtatatcctatggccctgactg

SEQ ID NO: 3809 - DNA, 32 bp, synthetic construct
  misc_feature 1..32: note = Synthetic
  source 1..32: mol_type = other DNA
tacctgaaccgtatatcctatggccctgactg

SEQ ID NO: 3810 - DNA, 35 bp, synthetic construct
  misc_feature 1..35: note = Synthetic
  source 1..35: mol_type = other DNA
tggtacctgaaccgtatatcctatggccctgactg

SEQ ID NO: 3811 - DNA, 57 bp, synthetic construct
  misc_feature 1..57: note = Synthetic
  source 1..57: mol_type = other DNA
acactctttccctacacgacgctcttccgatctnnnnatgtgggctgcctagaaagg

SEQ ID NO: 3812 - DNA, 49 bp, synthetic construct
  misc_feature 1..49: note = Synthetic
  source 1..49: mol_type = other DNA
tggagttcagacgtgtgctcttccgatctcccagccaaacttgtcaacc

SEQ ID NO: 3813 - DNA, 57 bp, synthetic construct
  misc_feature 1..57: note = Synthetic
  source 1..57: mol_type = other DNA
acactctttccctacacgacgctcttccgatctnnnnacgtctcatatgccccttgg

SEQ ID NO: 3814 - DNA, 51 bp, synthetic construct
  misc_feature 1..51: note = Synthetic
  source 1..51: mol_type = other DNA
tggagttcagacgtgtgctcttccgatctacgtaggaattttggtgggaca

SEQ ID NO: 3815 - DNA, 57 bp, synthetic construct
  misc_feature 1..57: note = Synthetic
  source 1..57: mol_type = other DNA
acactctttccctacacgacgctcttccgatctnnnngaacccaggtagccagagac

SEQ ID NO: 3816 - DNA, 49 bp, synthetic construct
  misc_feature 1..49: note = Synthetic
  source 1..49: mol_type = other DNA
tggagttcagacgtgtgctcttccgatcttcctttcaacccgaacggag

SEQ ID NO: 3817 - DNA, 57 bp, synthetic construct
  misc_feature 1..57: note = Synthetic
  source 1..57: mol_type = other DNA
acactctttccctacacgacgctcttccgatctnnnncagctcagcctgagtgttga

SEQ ID NO: 3818 - DNA, 48 bp, synthetic construct
  misc_feature 1..48: note = Synthetic
  source 1..48: mol_type = other DNA
tggagttcagacgtgtgctcttccgatctctcgtgggtttgtggttgc

SEQ ID NO: 3819 - DNA, 57 bp, synthetic construct
  misc_feature 1..57: note = Synthetic
  source 1..57: mol_type = other DNA
acactctttccctacacgacgctcttccgatctnnnncattgcagagaggcgtatca

SEQ ID NO: 3820 - DNA, 47 bp, synthetic construct
  misc_feature 1..47: note = Synthetic
  source 1..47: mol_type = other DNA
tggagttcagacgtgtgctcttccgatctggggtcccaggtgctgac

SEQ ID NO: 3821 - DNA, 58 bp, synthetic construct
  misc_feature 1..58: note = Synthetic
  source 1..58: mol_type = other DNA
acactctttccctacacgacgctcttccgatctnnnnagggttggccaatctactccc

SEQ ID NO: 3822 - DNA, 51 bp, synthetic construct
  misc_feature 1..51: note = Synthetic
  source 1..51: mol_type = other DNA
tggagttcagacgtgtgctcttccgatctgtcttctctgtctccacatgcc

SEQ ID NO: 3823 - DNA, 57 bp, synthetic construct
  misc_feature 1..57: note = Synthetic
  source 1..57: mol_type = other DNA
acactctttccctacacgacgctcttccgatctnnnngtcagtggaacaagccgagt

SEQ ID NO: 3824 - DNA, 49 bp, synthetic construct
  misc_feature 1..49: note = Synthetic
  source 1..49: mol_type = other DNA
tggagttcagacgtgtgctcttccgatctacttggttggggtaacggtg

SEQ ID NO: 3825 - DNA, 57 bp, synthetic construct
  misc_feature 1..57: note = Synthetic
  source 1..57: mol_type = other DNA
acactctttccctacacgacgctcttccgatctnnnncatacaggtgtggcgagagg

SEQ ID NO: 3826 - DNA, 49 bp, synthetic construct
  misc_feature 1..49: note = Synthetic
  source 1..49: mol_type = other DNA
tggagttcagacgtgtgctcttccgatctccagcctcctttggttagca

SEQ ID NO: 3827 - DNA, 59 bp, synthetic construct
  misc_feature 1..59: note = Synthetic
  source 1..59: mol_type = other DNA
acactctttccctacacgacgctcttccgatctnnnntcacaaacaagacagggaactg

SEQ ID NO: 3828 - DNA, 50 bp, synthetic construct
  misc_feature 1..50: note = Synthetic
  source 1..50: mol_type = other DNA
tggagttcagacgtgtgctcttccgatctagatgtagggctagaggggtg

SEQ ID NO: 3829 - DNA, 59 bp, synthetic construct
  misc_feature 1..59: note = Synthetic
  source 1..59: mol_type = other DNA
acactctttccctacacgacgctcttccgatctnnnnacttggtgccaaattcttctcc

SEQ ID NO: 3830 - DNA, 50 bp, synthetic construct
  misc_feature 1..50: note = Synthetic
  source 1..50: mol_type = other DNA
tggagttcagacgtgtgctcttccgatctaaagagggaatgggctttgga

SEQ ID NO: 3831 - DNA, 58 bp, synthetic construct
  misc_feature 1..58: note = Synthetic
  source 1..58: mol_type = other DNA
acactctttccctacacgacgctcttccgatctnnnncacaacagcttcatgtcagcc

SEQ ID NO: 3832 - DNA, 52 bp, synthetic construct
  misc_feature 1..52: note = Synthetic
  source 1..52: mol_type = other DNA
tggagttcagacgtgtgctcttccgatctacgttaatgtttcctgatggtcc

SEQ ID NO: 3833 - DNA, 57 bp, synthetic construct
  misc_feature 1..57: note = Synthetic
  source 1..57: mol_type = other DNA
acactctttccctacacgacgctcttccgatctnnnntcccctgttgacctggagaa

SEQ ID NO: 3834 - DNA, 49 bp, synthetic construct
  misc_feature 1..49: note = Synthetic
  source 1..49: mol_type = other DNA
tggagttcagacgtgtgctcttccgatctcactgtacttgccctgacca

SEQ ID NO: 3835 - DNA, 57 bp, synthetic construct
  misc_feature 1..57: note = Synthetic
  source 1..57: mol_type = other DNA
acactctttccctacacgacgctcttccgatctnnnnttggtgttgacagggagcaa

SEQ ID NO: 3836 - DNA, 49 bp, synthetic construct
  misc_feature 1..49: note = Synthetic
  source 1..49: mol_type = other DNA
tggagttcagacgtgtgctcttccgatctctgagatgtgggcagaaggg

SEQ ID NO: 3837 - DNA, 57 bp, synthetic construct
  misc_feature 1..57: note = Synthetic
  source 1..57: mol_type = other DNA
acactctttccctacacgacgctcttccgatctnnnntgagagggaacagaagggct

SEQ ID NO: 3838 - DNA, 49 bp, synthetic construct
  misc_feature 1..49: note = Synthetic
  source 1..49: mol_type = other DNA
tggagttcagacgtgtgctcttccgatctgtccaaaggcccaagaacct

SEQ ID NO: 3839 - DNA, 58 bp, synthetic construct
  misc_feature 1..58: note = Synthetic
  source 1..58: mol_type = other DNA
acactctttccctacacgacgctcttccgatctnnnntcctagcactttggaaggtcg

SEQ ID NO: 3840 - DNA, 51 bp, synthetic construct
  misc_feature 1..51: note = Synthetic
  source 1..51: mol_type = other DNA
tggagttcagacgtgtgctcttccgatctgctcatcttaatctgctcagcc

SEQ ID NO: 3841 - DNA, 57 bp, synthetic construct
  misc_feature 1..57: note = Synthetic
  source 1..57: mol_type = other DNA
acactctttccctacacgacgctcttccgatctnnnnggcatggcttctgagactca

SEQ ID NO: 3842 - DNA, 53 bp, synthetic construct
  misc_feature 1..53: note = Synthetic
  source 1..53: mol_type = other DNA
tggagttcagacgtgtgctcttccgatctgtctcccttgcactccctgtcttt

SEQ ID NO: 3843 - DNA, 57 bp, synthetic construct
  misc_feature 1..57: note = Synthetic
  source 1..57: mol_type = other DNA
acactctttccctacacgacgctcttccgatctnnnntttggcaatggaggcattgg

SEQ ID NO: 3844 - DNA, 49 bp, synthetic construct
  misc_feature 1..49: note = Synthetic
  source 1..49: mol_type = other DNA
tggagttcagacgtgtgctcttccgatctgaagaggctgcccatgagag

SEQ ID NO: 3845 - DNA, 57 bp, synthetic construct
  misc_feature 1..57: note = Synthetic
  source 1..57: mol_type = other DNA
acactctttccctacacgacgctcttccgatctnnnnggtctgaggctcgaatcctg

SEQ ID NO: 3846 - DNA, 49 bp, synthetic construct
  misc_feature 1..49: note = Synthetic
  source 1..49: mol_type = other DNA
tggagttcagacgtgtgctcttccgatctctgtggcctccatatccctg

SEQ ID NO: 3847 - DNA, 57 bp, synthetic construct
  misc_feature 1..57: note = Synthetic
  source 1..57: mol_type = other DNA
acactctttccctacacgacgctcttccgatctnnnntttccaccagaactcagccc

SEQ ID NO: 3848 - DNA, 49 bp, synthetic construct
  misc_feature 1..49: note = Synthetic
  source 1..49: mol_type = other DNA
tggagttcagacgtgtgctcttccgatctcctcggttcctccacaacac

SEQ ID NO: 3849 - DNA, 62 bp, synthetic construct
  misc_feature 1..62: note = Synthetic
  source 1..62: mol_type = other DNA
acactctttccctacacgacgctcttccgatctnnnngtggggagatttgcatctgtggagg

SEQ ID NO: 3850 - DNA, 55 bp, synthetic construct
  misc_feature 1..55: note = Synthetic
  source 1..55: mol_type = other DNA
tggagttcagacgtgtgctcttccgatctgcttttataccatcttggggttacag

SEQ ID NO: 3851 - DNA, 61 bp, synthetic construct
  misc_feature 1..61: note = Synthetic
  source 1..61: mol_type = other DNA
acactctttccctacacgacgctcttccgatctnnnncaatgtgcttcaacccatcacggc

SEQ ID NO: 3852 - DNA, 56 bp, synthetic construct
  misc_feature 1..56: note = Synthetic
  source 1..56: mol_type = other DNA
tggagttcagacgtgtgctcttccgatctccatgaatttgtgatggatgcagtctg

SEQ ID NO: 3853 - DNA, 61 bp, synthetic construct
  misc_feature 1..61: note = Synthetic
  source 1..61: mol_type = other DNA
acactctttccctacacgacgctcttccgatctnnnngagaaggaggtgcaggagctagac

SEQ ID NO: 3854 - DNA, 53 bp, synthetic construct
  misc_feature 1..53: note = Synthetic
  source 1..53: mol_type = other DNA
tggagttcagacgtgtgctcttccgatctcatcccgaccttcatccctcctgg

SEQ ID NO: 3855 - DNA, 62 bp, synthetic construct
  misc_feature 1..62: note = Synthetic
  source 1..62: mol_type = other DNA
acactctttccctacacgacgctcttccgatctnnnngtagttctgacattcctcctgaggg

SEQ ID NO: 3856 - DNA, 52 bp, synthetic construct
  misc_feature 1..52: note = Synthetic
  source 1..52: mol_type = other DNA
tggagttcagacgtgtgctcttccgatcttcaaacaaggtgcagatacagca

SEQ ID NO: 3857 - DNA, 59 bp, synthetic construct
  misc_feature 1..59: note = Synthetic
  source 1..59: mol_type = other DNA
acactctttccctacacgacgctcttccgatctnnnngcgggcagtggcgtcttagtcg

SEQ ID NO: 3858 - DNA, 51 bp, synthetic construct
  misc_feature 1..51: note = Synthetic
  source 1..51: mol_type = other DNA
tggagttcagacgtgtgctcttccgatctccctgggtttggttggctgctc

SEQ ID NO: 3859 - DNA, 58 bp, synthetic construct
  misc_feature 1..58: note = Synthetic
  source 1..58: mol_type = other DNA
acactctttccctacacgacgctcttccgatctnnnnctccttgccgcccagccggtc

SEQ ID NO: 3860 - DNA, 52 bp, synthetic construct
  misc_feature 1..52: note = Synthetic
  source 1..52: mol_type = other DNA
tggagttcagacgtgtgctcttccgatctcactggggaagaggcgaggacac

SEQ ID NO: 3861 - DNA, 60 bp, synthetic construct
  misc_feature 1..60: note = Synthetic
  source 1..60: mol_type = other DNA
acactctttccctacacgacgctcttccgatctnnnnccagtgtttcccatccccaacac

SEQ ID NO: 3862 - DNA, 52 bp, synthetic construct
  misc_feature 1..52: note = Synthetic
  source 1..52: mol_type = other DNA
tggagttcagacgtgtgctcttccgatctgaatggatccccccctagagctc

SEQ ID NO: 3863 - DNA, 59 bp, synthetic construct
  misc_feature 1..59: note = Synthetic
  source 1..59: mol_type = other DNA
acactctttccctacacgacgctcttccgatctnnnncaggcccacaggtccttctgga

SEQ ID NO: 3864 - protein, 18 aa, synthetic construct
  REGION 1..18: note = Synthetic
KRTADGSEFESPKKKRKV

SEQ ID NO: 3865 - protein, 236 aa, Homo sapiens
MSEAPRAETFVFLDLEATGLPSVEPEIAELSLFAVHRSSLENPEHDESGALVLPRVLDKLTLCMCPERPFTAKASEITGLSSEGLARCRKAGFDGAVVRTLQAFLSRQAGPICLVAHNGFDYDFPLLCAELRRLGARLPRDTVCLDTLPALRGLDRAHSHGTRARGRQGYSLGSLFHRYFRAEPSAAHSAEGDVHTLLLIFLHRAAELLAWADEQARGWAHIEPMYLPPDDPSLEA

SEQ ID NO: 3866 - protein, 236 aa, Mus musculus
MSEPPRAETFVFLDLEATGLPNMDPEIAEISLFAVHRSSLENPERDDSGSLVLPRVLDKLTLCMCPERPFTAKASEITGLSSESLMHCGKAGFNGAVVRTLQGFLSRQEGPICLVAHNGFDYDFPLLCTELQRLGAHLPQDTVCLDTLPALRGLDRAHSHGTRAQGRKSYSLASLFHRYFQAEPSAAHSAEGDVHTLLLIFLHRAPELLAWADEQARSWAHIEPMYVPPDGPSLEA

SEQ ID NO: 3867 - protein, 236 aa, Rattus norvegicus
MSEPLRAETFVFLDLEATGLPNMDPEIAEISLFAVHRSSLENPERDDSGSLVLPRVLDKLTLCMCPERPFTAKASEITGLSSEGLMNCRKAAFNDAVVRTLQGFLSRQEGPICLVAHNGFDYDFPLLCTELQRLGAHLPRDTVCLDTLPALRGLDRVHSHGTRAQGRKSYSLASLFHRYFQAEPSAAHSAEGDVNTLLLIFLHRAPELLAWADEQARSWAHIEPMYVPPDGPSLEA

SEQ ID NO: 3868 - protein, 803 aa, Homo sapiens
MGIQGLLQFIKEASEPIHVRKYKGQVVAVDTYCWLHKGAIACAEKLAKGEPTDRYVGFCMKFVNMLLSHGIKPILVFDGCTLPSKKEVERSRRERRQANLLKGKQLLREGKVSEARECFTRSINITHAMAHKVIKAARSQGVDCLVAPYEADAQLAYLNKAGIVQAIITEDSDLLAFGCKKVILKMDQFGNGLEIDQARLGMCRQLGDVFTEEKFRYMCILSGCDYLSSLRGIGLAKACKVLRLANNPDIVKVIKKIGHYLKMNITVPEDYINGFIRANNTFLYQLVFDPIKRKLIPLNAYEDDVDPETLSYAGQYVDDSIALQIALGNKDINTFEQIDDYNPDTAMPAHSRSHSWDDKTCQKSANVSSIWHRNYSPRPESGTVSDAPQLKENPSTVGVERVISTKGLNLPRKSSIVKRPRSAELSEDDLLSQYSLSFTKKTKKNSSEGNKSLSFSEVFVPDLVNGPTNKKSVSTPPRTRNKFATFLQRKNEESGAVVVPGTRSRFFCSSDSTDCVSNKVSIQPLDETAVTDKENNLHESEYGDQEGKRLVDTDVARNSSDDIPNNHIPGDHIPDKATVFTDEESYSFESSKFTRTISPPTLGTLRSCFSWSGGLGDFSRTPSPSPSTALQQFRRKSDSPTSLPENNMSDVSQLKSEESSDDESHPLREEACSSQSQESGEFSLQSSNASKLSQCSSKDSDSEESDCNIKLLDSQSDQTSKLRLSHFSKKDTPLRNKVPGLYKSSSADSLSTTKIKPLGPARASGLSKKPASIQKRKHHNAENKPGLQIKLNELWKNFGFKKF

SEQ ID NO: 3869 - protein, 846 aa, Homo sapiens
MGIQGLLQFIKEASEPIHVRKYKGQVVAVDTYCWLHKGAIACAEKLAKGEPTDRYVGFCMKFVNMLLSHGIKPILVFDGCTLPSKKEVERSRRERRQANLLKGKQLLREGKVSEARECFTRSINITHAMAHKVIKAARSQGVDCLVAPYEADAQLAYLNKAGIVQAIITEDSDLLAFGCKKVILKMDQFGNGLEIDQARLGMCRQLGDVFTEEKFRYMCILSGCDYLSSLRGIGLAKACKVLRLANNPDIVKVIKKIGHYLKMNITVPEDYINGFIRANNTFLYQLVFDPIKRKLIPLNAYEDDVDPETLSYAGQYVDDSIALQIALGNKDINTFEQIDDYNPDTAMPAHSRSHSWDDKTCQKSANVSSIWHRNYSPRPESGTVSDAPQLKENPSTVGVERVISTKGLNLPRKSSIVKRPRSAELSEDDLLSQYSLSFTKKTKKNSSEGNKSLSFSEVFVPDLVNGPTNKKSVSTPPRTRNKFATFLQRKNEESGAVVVPGTRSRFFCSSDSTDCVSNKVSIQPLDETAVTDKENNLHESEYGDQEGKRLVDTDVARNSSDDIPNNHIPGDHIPDKATVFTDEESYSFESSKFTRTISPPTLGTLRSCFSWSGGLGDFSRTPSPSPSTALQQFRRKSDSPTSLPENNMSDVSQLKSEESSDDESHPLREEACSSQSQESGEFSLQSSNASKLSQCSSKDSDSEESDCNIKLLDSQSDQTSKLRLSHFSKKDTPLRNKVPGLYKSSSADSLSTTKIKPLGPARASGLSKKPASIQKRKHHNAENKPGLQIKLNELWKNFGFKKDSEKLPPCKKPLSPVRDNIQLTPEAEEDIFNKPECGRVQRAIFQ

SEQ ID NO: 3870 - protein, 845 aa, Homo sapiens
MGIQGLLQFIKEASEPIHVRKYKGQVVAVDTYCWLHKGAIACAEKLAKGEPTDRYVGFCMKFVNMLLSHGIKPILVFDGCTLPSKKEVERSRRERRQANLLKGKQLLREGKVSEARECFTRSINITHAMAHKVIKAARSQGVDCLVAPYEADAQLAYLNKAGIVQAIITEDSDLLAFGCKKVILKMDQFGNGLEIDQARLGMCRQLGDVFTEEKFRYMCILSGCDYLSSLRGIGLAKACKVLRLANNPDIVKVIKKIGHYLKMNITVPEDYINGFIRANNTFLYQLVFDPIKRKLIPLNAYEDDVDPETLSYAGQYVDDSIALQIALGNKDINTFEQIDDYNPDTAMPAHSRSHSWDDKTCQKSANVSSIWHRNYSPRPESGTVSDAPQLKENPSTVGVERVISTKGLNLPRKSSIVKRPRSELSEDDLLSQYSLSFTKKTKKNSSEGNKSLSFSEVFVPDLVNGPTNKKSVSTPPRTRNKFATFLQRKNEESGAVVVPGTRSRFFCSSDSTDCVSNKVSIQPLDETAVTDKENNLHESEYGDQEGKRLVDTDVARNSSDDIPNNHIPGDHIPDKATVFTDEESYSFESSKFTRTISPPTLGTLRSCFSWSGGLGDFSRTPSPSPSTALQQFRRKSDSPTSLPENNMSDVSQLKSEESSDDESHPLREEACSSQSQESGEFSLQSSNASKLSQCSSKDSDSEESDCNIKLLDSQSDQTSKLRLSHFSKKDTPLRNKVPGLYKSSSADSLSTTKIKPLGPARASGLSKKPASIQKRKHHNAENKPGLQIKLNELWKNFGFKKDSEKLPPCKKPLSPVRDNIQLTPEAEEDIFNKPECGRVQRAIFQ

SEQ ID NO: 3871 - protein, 580 aa, Homo sapiens
MGTTGLESLSLGDRGAAPTVTSSERLVPDPPNDLRKEDVAMELERVGEDEEQMMIKRSSECNPLLQEPIASAQFGATAGTECRKSVPCGWERVVKQRLFGKTAGRFDVYFISPQGLKFRSKSSLANYLHKNGETSLKPEDFDFTVLSKRGIKSRYKDCSMAALTSHLQNQSNNSNWNLRTRSKCKKDVFMPPSSSSELQESRGLSNFTSTHLLLKEDEGVDDVNFRKVRKPKGKVTILKGIPIKKTKKGCRKSCSGFVQSDSKRESVCNKADAESEPVAQKSQLDRTVCISDAGACGETLSVTSEENSLVKKKERSLSSGSNFCSEQKTSGIINKFCSAKDSEHNEKYEDTFLESEEIGTKVEVVERKEHLHTDILKRGSEMDNNCSPTRKDFTGEKIFQEDTIPRTQIERRKTSLYFSSKYNKEALSPPRRKAFKKWTPPRSPFNLVQETLFHDPWKLLIATIFLNRTSGKMAIPVLWKFLEKYPSAEVARTADWRDVSELLKPLGLYDLRAKTIVKFSDEYLTKQWKYPIELHGIGKYGNDSYRIFCVNEWKQVHPEDHKLNKYHDWLWENHEKLSLS

SEQ ID NO: 3872 - protein, 410 aa, Homo sapiens
MEAENAGSYSLQQAQAFYTFPFQQLMAEAPNMAVVNEQQMPEEVPAPAPAQEPVQEAPKGRKRKPRTTEPKQPVEPKKPVESKKSGKSAKSKEKQEKITDTFKVKRKVDRFNGVSEAELLTKTLPDILTFNLDIVIIGINPGLMAAYKGHHYPGPGNHFWKCLFMSGLSEVQLNHMDDHTLPGKYGIGFTNMVERTTPGSKDLSSKEFREGGRILVQKLQKYQPRIAVFNGKCIYEIFSKEVFGVKVKNLEFGLQPHKIPDTETLCYVMPSSSARCAQFPRAQDKVHYYIKLKDLRDQLKGIERNMDVQEVQYTFDLQLAQEDAKKMAVKEEKYDPGYEAAYGGAYGENPCSSEPCGFSSNGLIESVELRGESAFSGIPNGQWMTQSFTDQIPSFSNHCGTQEQEEESHA

SEQ ID NO: 3873 - protein, 84 aa, synthetic construct
  REGION 1..84: note = Synthetic
MTNLSDIIEKETGKQLVIQESILMLPEEVEEVIGNKPESDILVHTAYDESTDENVMLLTSDAPEYKPWALVIQDSNGENKIKML

SEQ ID NO: 3874 - skipped

SEQ ID NO: 3875 - protein, 1165 aa, synthetic construct
  REGION 1..1165: note = Synthetic
MKRTADGSEFESPKKKRKVDKKYSIGLDIGTNSVGWAVITDEYKVPSKKFKVLGNTDRHSIKKNLIGALLFDSGETAEATRLKRTARRRYTRRKNRICYLQEIFSNEMAKVDDSFFHRLEESFLVEEDKKHERHPIFGNIVDEVAYHEKYPTIYHLRKKLVDSTDKADLRLIYLALAHMIKFRGHFLIEGDLNPDNSDVDKLFIQLVQTYNQLFEENPINASGVDAKAILSARLSKSRRLENLIAQLPGEKKNGLFGNLIALSLGLTPNFKSNFDLAEDAKLQLSKDTYDDDLDNLLAQIGDQYADLFLAAKNLSDAILLSDILRVNTEITKAPLSASMIKRYDEHHQDLTLLKALVRQQLPEKYKEIFFDQSKNGYAGYIDGGASQEEFYKFIKPILEKMDGTEELLVKLNREDLLRKQRTFDNGSIPHQIHLGELHAILRRQEDFYPFLKDNREKIEKILTFRIPYYVGPLARGNSRFAWMTRKSEETITPWNFEEVVDKGASAQSFIERMTNFDKNLPNEKVLPKHSLLYEYFTVYNELTKVKYVTEGMRKPAFLSGEQKKAIVDLLFKTNRKVTVKQLKEDYFKKIECFDSVEISGVEDRFNASLGTYHDLLKIIKDKDFLDNEENEDILEDIVLTLTLFEDREMIEERLKTYAHLFDDKVMKQLKRRRYTGWGRLSRKLINGIRDKQSGKTILDFLKSDGFANRNFMQLIHDDSLTFKEDIQKAQVSGQGDSLHEHIANLAGSPAIKKGILQTVKVVDELVKVMGRHKPENIVIEMARENQTTQKGQKNSRERMKRIEEGIKELGSQILKEHPVENTQLQNEKLYLYYLQNGRDMYVDQELDINRLSDYDVDAIVPQSFLKDDSIDNKVLTRSDKNRGKSDNVPSEEVVKKMKNYWRQLLNAKLITQRKFDNLTKAERGGLSELDKAGFIKRQLVETRQITKHVAQILDSRMNTKYDENDKLIREVKVITLKSKLVSDFRKDFQFYKVREINNYHHAHDAYLNAVVGTALIKKYPKLESEFVYGDYKVYDVRKMIAKCLSYETEILTVEYGLLPIGKIVEKRIECTVYSVDNNGNIYTQPVAQWHDRGEQEVFEYCLEDGSLIRATKDHKFMTVDGQMLPIDEIFERELDLMRVDNLPNSGGSKRTADGSEFEPKKKRKV

SEQ ID NO: 3876 - protein, 1128 aa, synthetic construct
  REGION 1..1128: note = Synthetic
MKRTADGSEFESPKKKRKVIKIATRKYLGKQNVYDIGVERDHNFALKNGFIASNCFNEIGKATAKYFFYSNIMNFFKTEITLANGEIRKRPLIETNGETGEIVWDKGRDFATVRKVLSMPQVNIVKKTEVQTGGFSKESILPKRNSDKLIARKKDWDPKKYGGFDSPTVAYSVLVVAKVEKGKSKKLKSVKELLGITIMERSSFEKNPIDFLEAKGYKEVKKDLIIKLPKYSLFELENGRKRMLASAGELQKGNELALPSKYVNFLYLASHYEKLKGSPEDNEQKQLFVEQHKHYLDEIIEQISEFSKRVILADANLDKVLSAYNKHRDKPIREQAENIIHLFTLTNLGAPAAFKYFDTTIDRKRYTSTKEVLDATLIHQSITGLYETRIDLSQLGGDSGGSSGGSSGSETPGTSESATPESSGGSSGGSSTLNIEDEYRLHETSKEPDVSLGSTWLSDFPQAWAETGGMGLAVRQAPLIIPLKATSTPVSIKQYPMSQEARLGIKPHIQRLLDQGILVPCQSPWNTPLLPVKKPGTNDYRPVQDLREVNKRVEDIHPTVPNPYNLLSGLPPSHQWYTVLDLKDAFFCLRLHPTSQPLFAFEWRDPEMGISGQLTWTRLPQGFKNSPTLFNEALHRDLADFRIQHPDLILLQYVDDLLLAATSELDCQQGTRALLQTLGNLGYRASAKKAQICQKQVKYLGYLLKEGQRWLTEARKETVMGQPTPKTPRQLREFLGKAGFCRLFIPGFAEMAAPLYPLTKPGTLFNWGPDQQKAYQEIKQALLTAPALGLPDLTKPFELFVDEKQGYAKGVLTQKLGPWRRPVAYLSKKLDPVAAGWPPCLRMVAAIAVLTKDAGKLTMGQPLVILAPHAVEALVKQPPDRWLSNARMTHYQALLLDTDRVQFGPVVALNPATLLPLPEEGLQHNCLDILAEAHGTRPDLTDQPLPDADHTWYTDGSSLLQEGQRKAGAAVTTETEVIWAKALPAGTSAQRAELIALTQALKMAEGKKLNVYTDSRYAFATAHIHGEIYRRRGWLTSEGKEIKNKDEILALLKALFLPKRLSIIHCPGHQKGHSAEARGNRMADQAARKAAITETPDTSTLLIENSSPSGGSKRTADGSEFEPKKKRK

SEQ ID NO: 3877 - protein, 1024 aa, Streptococcus pyogenes
MDKKYSIGLDIGTNSVGWAVITDEYKVPSKKFKVLGNTDRHSIKKNLIGALLFDSGETAEATRLKRTARRRYTRRKNRICYLQEIFSNEMAKVDDSFFHRLEESFLVEEDKKHERHPIFGNIVDEVAYHEKYPTIYHLRKKLVDSTDKADLRLIYLALAHMIKFRGHFLIEGDLNPDNSDVDKLFIQLVQTYNQLFEENPINASGVDAKAILSARLSKSRRLENLIAQLPGEKKNGLFGNLIALSLGLTPNFKSNFDLAEDAKLQLSKDTYDDDLDNLLAQIGDQYADLFLAAKNLSDAILLSDILRVNTEITKAPLSASMIKRYDEHHQDLTLLKALVRQQLPEKYKEIFFDQSKNGYAGYIDGGASQEEFYKFIKPILEKMDGTEELLVKLNREDLLRKQRTFDNGSIPHQIHLGELHAILRRQEDFYPFLKDNREKIEKILTFRIPYYVGPLARGNSRFAWMTRKSEETITPWNFEEVVDKGASAQSFIERMTNFDKNLPNEKVLPKHSLLYEYFTVYNELTKVKYVTEGMRKPAFLSGEQKKAIVDLLFKTNRKVTVKQLKEDYFKKIECFDSVEISGVEDRFNASLGTYHDLLKIIKDKDFLDNEENEDILEDIVLTLTLFEDREMIEERLKTYAHLFDDKVMKQLKRRRYTGWGRLSRKLINGIRDKQSGKTILDFLKSDGFANRNFMQLIHDDSLTFKEDIQKAQVSGQGDSLHEHIANLAGSPAIKKGILQTVKVVDELVKVMGRHKPENIVIEMARENQTTQKGQKNSRERMKRIEEGIKELGSQILKEHPVENTQLQNEKLYLYYLQNGRDMYVDQELDINRLSDYDVDAIVPQSFLKDDSIDNKVLTRSDKNRGKSDNVPSEEVVKKMKNYWRQLLNAKLITQRKFDNLTKAERGGLSELDKAGFIKRQLVETRQITKHVAQILDSRMNTKYDENDKLIREVKVITLKSKLVSDFRKDFQFYKVREINNYHHAHDAYLNAVVGTALIKKYPKLESEFVYGDYKVYDVRKMIAK

SEQ ID NO: 3878 - protein, 1023 aa, Streptococcus pyogenes
DKKYSIGLDIGTNSVGWAVITDEYKVPSKKFKVLGNTDRHSIKKNLIGALLFDSGETAEATRLKRTARRRYTRRKNRICYLQEIFSNEMAKVDDSFFHRLEESFLVEEDKKHERHPIFGNIVDEVAYHEKYPTIYHLRKKLVDSTDKADLRLIYLALAHMIKFRGHFLIEGDLNPDNSDVDKLFIQLVQTYNQLFEENPINASGVDAKAILSARLSKSRRLENLIAQLPGEKKNGLFGNLIALSLGLTPNFKSNFDLAEDAKLQLSKDTYDDDLDNLLAQIGDQYADLFLAAKNLSDAILLSDILRVNTEITKAPLSASMIKRYDEHHQDLTLLKALVRQQLPEKYKEIFFDQSKNGYAGYIDGGASQEEFYKFIKPILEKMDGTEELLVKLNREDLLRKQRTFDNGSIPHQIHLGELHAILRRQEDFYPFLKDNREKIEKILTFRIPYYVGPLARGNSRFAWMTRKSEETITPWNFEEVVDKGASAQSFIERMTNFDKNLPNEKVLPKHSLLYEYFTVYNELTKVKYVTEGMRKPAFLSGEQKKAIVDLLFKTNRKVTVKQLKEDYFKKIECFDSVEISGVEDRFNASLGTYHDLLKIIKDKDFLDNEENEDILEDIVLTLTLFEDREMIEERLKTYAHLFDDKVMKQLKRRRYTGWGRLSRKLINGIRDKQSGKTILDFLKSDGFANRNFMQLIHDDSLTFKEDIQKAQVSGQGDSLHEHIANLAGSPAIKKGILQTVKVVDELVKVMGRHKPENIVIEMARENQTTQKGQKNSRERMKRIEEGIKELGSQILKEHPVENTQLQNEKLYLYYLQNGRDMYVDQELDINRLSDYDVDAIVPQSFLKDDSIDNKVLTRSDKNRGKSDNVPSEEVVKKMKNYWRQLLNAKLITQRKFDNLTKAERGGLSELDKAGFIKRQLVETRQITKHVAQILDSRMNTKYDENDKLIREVKVITLKSKLVSDFRKDFQFYKVREINNYHHAHDAYLNAVVGTALIKKYPKLESEFVYGDYKVYDVRKMIAK

SEQ ID NO: 3879 - protein, 344 aa, Streptococcus pyogenes
SEQEIGKATAKYFFYSNIMNFFKTEITLANGEIRKRPLIETNGETGEIVWDKGRDFATVRKVLSMPQVNIVKKTEVQTGGFSKESILPKRNSDKLIARKKDWDPKKYGGFDSPTVAYSVLVVAKVEKGKSKKLKSVKELLGITIMERSSFEKNPIDFLEAKGYKEVKKDLIIKLPKYSLFELENGRKRMLASAGELQKGNELALPSKYVNFLYLASHYEKLKGSPEDNEQKQLFVEQHKHYLDEIIEQISEFSKRVILADANLDKVLSAYNKHRDKPIREQAENIIHLFTLTNLGAPAAFKYFDTTIDRKRYTSTKEVLDATLIHQSITGLYETRIDLSQLGGD

SEQ ID NO: 3880-3888 - skipped (9 entries)

SEQ ID NO: 3889 - protein, 12 aa, synthetic construct
  REGION 1..12: note = Synthetic
SGGSSGGSSGGS

SEQ ID NO: 3890-3933 - skipped (44 entries)

SEQ ID NO: 3934 - protein, 11 aa, synthetic construct
  REGION 1..11: note = Synthetic
RQRRNELKRSF

SEQ ID NO: 3935 - protein, 38 aa, synthetic construct
  REGION 1..38: note = Synthetic
NQSSNFGPMKGGNFGGRSSGPYGGGGQYFAKPRNQGGY

SEQ ID NO: 3936 - protein, 16 aa, Rattus norvegicus
KRXXXXXXXXXXKKKL

SEQ ID NO: 3937 - protein, 345 aa, Homo sapiens
MPARALLPRRMGHRTLASTPALWASIPCPRSELRLDLVLPSGQSFRWREQSPAHWSGVLADQVWTLTQTEEQLHCTVYRGDKSQASRPTPDELEAVRKYFQLDVTLAQLYHHWGSVDSHFQEVAQKFQGVRLLRQDPIECLFSFICSSNNNIARITGMVERLCQAFGPRLIQLDDVTYHGFPSLQALAGPEVEAHLRKLGLGYRARYVSASARAILEEQGGLAWLQQLRESSYEEAHKALCILPGVGTKVADCICLMALDKPQAVPVDVHMWHIAQRDYSWHPTTSQAKGPSPQTNKELGNFFRSLWGPYAGWAQAVLFSADLRQSRHAQEPPAKRRKGSKGPEG

SEQ ID NO: 3938 - protein, 298 aa, Homo sapiens
MVTPALQMKKPKQFCRRMGQKKQRPARAGQPHSSSDAAQAPAEQPHSSSDAAQAPCPRERCLGPPTTPGPYRSIYFSSPKGHLTRLGLEFFDQPAVPLARAFLGQVLVRRLPNGTELRGRIVETEAYLGPEDEAAHSRGGRQTPRNRGMFMKPGTLYVYIIYGMYFCMNISSQGDGACVLLRALEPLEGLETMRQLRSTLRKGTASRVLKDRELCSGPSKLCQALAINKSFDQRDLAQDEAVWLERGPLEPSEPAVVAAARVGVGHAGEWARKPLRFYVRGSPWVSVVDRVAEQDTQA

SEQ ID NO: 3939 - DNA, 10 bp, synthetic construct
  misc_feature 1..10: note = Synthetic
  misc_feature 5..6: note = May be non-consecutive
  source 1..10: mol_type = other DNA
gttttaaaac

SEQ ID NO: 3940 - protein, 240 aa, synthetic construct
  REGION 1..240: note = Synthetic
MANLGCWMLVLFVATWSDLGLCKKRPKPGGWNTGGSRYPGQGSPGGNRYPPQGGGGWGQPHGGGWGQPHGGGWGQPHGGGWGQPHGGGWGQGGGTHSQWNKPSKPKTNMKHMAGAAAAGAVVGGLGGYMLGSAMSRPIIHFGSDYEDRYYRENMHRYPNQVYYRPMDEYSNQNNFVHNCVNITIKQHTVTTTTKGENFTETDVKMMERVVEQMCITQYERESQAYYQRGSSMVLFSSPPV

SEQ ID NO: 3941 - protein, 240 aa, synthetic construct
  REGION 1..240: note = Synthetic
MANLGCWMLVLFVATWSDLGLCKKRPKPGGWNTGGSRYPGQGSPGGNRYPPQGGGGWGQPHGGGWGQPHGGGWGQPHGGGWGQPHGGGWGQGGGTHSQWNKPSKPKTNMKHMAGAAAAGAVVGGLGGYMLGSAMSRPIIHFGSDYEDRYYRENMHRYPNQVYYRPMDEYSNQNNFVHDCVNITIKQHKVTTTTKGENFTETDVKMMERVVEQMCITQYERESQAYYQRGSSMVLFSSPPV

SEQ ID NO: 3942 - protein, 240 aa, synthetic construct
  REGION 1..240: note = Synthetic
MANLGCWMLVLFVATWSDLGLCKKRPKPGGWNTGGSRYPGQGSPGGNRYPPQGGGGWGQPHGGGWGQPHGGGWGQPHGGGWGQPHGGGWGQGGGTHSQWNKPSKPKTNMKHMAGAAAAGAVVGGLGGYMLGSAMSRPIIHFGSDYEDRYYRENMHRYPNQVYYRPMDEYSNQNNFVHDCVNITIKQHTVTTTTKGKNFTETDVKMMERVVEQMCITQYERESQAYYQRGSSMVLFSSPPV

SEQ ID NO: 3943 - protein, 240 aa, synthetic construct
  REGION 1..240: note = Synthetic
MANLGCWMLVLFVATWSDLGLCKKRPKPGGWNTGGSRYPGQGSPGGNRYPPQGGGGWGQPHGGGWGQPHGGGWGQPHGGGWGQPHGGGWGQGGGTHSQWNKPSKPKTNMKHMAGAAAAGAVVGGLGGYMLGSAMSRPIIHFGSDYEDRYYRENMHRYPNQVYYRPMDEYSNQNNFVHDCVNITIKQHTVTTTTKGENFTKTDVKMMERVVEQMCITQYERESQAYYQRGSSMVLFSSPPV

SEQ ID NO: 3944 - protein, 240 aa, synthetic construct
  REGION 1..240: note = Synthetic
MANLGCWMLVLFVATWSDLGLCKKRPKPGGWNTGGSRYPGQGSPGGNRYPPQGGGGWGQPHGGGWGQPHGGGWGQPHGGGWGQPHGGGWGQGGGTHSQWNKPSKPKTNMKHMAGAAAAGAVVGGLGGYMLGSAMSRPIIHFGSDYEDRYYRENMHRYPNQVYYRPMDEYSNQNNFVHDCVNITIKQHTVTTTTKGENFTETDIKMMERVVEQMCITQYERESQAYYQRGSSMVLFSSPPV

SEQ ID NO: 3945 - protein, 240 aa, synthetic construct
  REGION 1..240: note = Synthetic
MANLGCWMLVLFVATWSDLGLCKKRPKPGGWNTGGSRYPGQGSPGGNRYPPQGGGGWGQPHGGGWGQPHGGGWGQPHGGGWGQPHGGGWGQGGGTHSQWNKPSKPKTNMKHMAGAAAAGAVVGGLGGYMLGSAMSRPIIHFGSDYEDRYYRENMHRYPNQVYYRPMDEYSNQNNFVHDCVNITIKQHTVTTTTKGENFTETDVKMMEHVVEQMCITQYERESQAYYQRGSSMVLFSSPPV

SEQ ID NO: 3946 - protein, 240 aa, synthetic construct
  REGION 1..240: note = Synthetic
MANLGCWMLVLFVATWSDLGLCKKRPKPGGWNTGGSRYPGQGSPGGNRYPPQGGGGWGQPHGGGWGQPHGGGWGQPHGGGWGQPHGGGWGQGGGTHSQWNKPSKPKTNMKHMAGAAAAGAVVGGLGGYMLGSAMSRPIIHFGSDYEDRYYRENMHRYPNQVYYRPMDEYSNQNNFVHDCVNITIKQHTVTTTTKGENFTETDVKMMERVIEQMCITQYERESQAYYQRGSSMVLFSSPPV

SEQ ID NO: 3947 - protein, 240 aa, synthetic construct
  REGION 1..240: note = Synthetic
MANLGCWMLVLFVATWSDLGLCKKRPKPGGWNTGGSRYPGQGSPGGNRYPPQGGGGWGQPHGGGWGQPHGGGWGQPHGGGWGQPHGGGWGQGGGTHSQWNKPSKPKTNMKHMAGAAAAGAVVGGLGGYMLGSAMSRPIIHFGSDYEDRYYRENMHRYPNQVYYRPMDEYSNQNNFVHDCVNITIKQHTVTTTTKGENFTETDVKMMERVVQQMCITQYERESQAYYQRGSSMVLFSSPPV

SEQ ID NO: 3948 - protein, 240 aa, synthetic construct
  REGION 1..240: note = Synthetic
MANLGCWMLVLFVATWSDLGLCKKRPKPGGWNTGGSRYPGQGSPGGNRYPPQGGGGWGQPHGGGWGQPHGGGWGQPHGGGWGQPHGGGWGQGGGTHSQWNKPSKPKTNMKHMAGAAAAGAVVGGLGGYMLGSAMSRPIIHFGSDYEDRYYRENMHRYPNQVYYRPMDEYSNQNNFVHDCVNITIKQHTVTTTTKGENFTETDVKMMERVVEQMCITQYERESQAYYQRGSSRVLFSSPPV

SEQ ID NO: 3949 - protein, 240 aa, synthetic construct
  REGION 1..240: note = Synthetic
MANLGCWMLVLFVATWSDLGLCKKRPKPGGWNTGGSRYPGQGSPGGNRYPPQGGGGWGQPHGGGWGQPHGGGWGQPHGGGWGQPHGGGWGQGGGTHSQWNKLSKPKTNMKHMAGAAAAGAVVGGLGGYMLGSAMSRPIIHFGSDYEDRYYRENMHRYPNQVYYRPMDEYSNQNNFVHDCVNITIKQHTVTTTTKGENFTETDVKMMERVVEQMCITQYERESQAYYQRGSSMVLFSSPPV

SEQ ID NO: 3950 - protein, 240 aa, synthetic construct
  REGION 1..240: note = Synthetic
MANLGCWMLVLFVATWSDLGLCKKRPKPGGWNTGGSRYPGQGSPGGNRYPPQGGGGWGQPHGGGWGQPHGGGWGQPHGGGWGQPHGGGWGQGGGTHSQWNKPSKLKTNMKHMAGAAAAGAVVGGLGGYMLGSAMSRPIIHFGSDYEDRYYRENMHRYPNQVYYRPMDEYSNQNNFVHDCVNITIKQHTVTTTTKGENFTETDVKMMERVVEQMCITQYERESQAYYQRGSSMVLFSSPPV

SEQ ID NO: 3951 - protein, 240 aa, synthetic construct
  REGION 1..240: note = Synthetic
MANLGCWMLVLFVATWSDLGLCKKRPKPGGWNTGGSRYPGQGSPGGNRYPPQGGGGWGQPHGGGWGQPHGGGWGQPHGGGWGQPHGGGWGQGGGTHSQWNKPSKPKTNMKHMAGAAVAGAVVGGLGGYMLGSAMSRPIIHFGSDYEDRYYRENMHRYPNQVYYRPMDEYSNQNNFVHDCVNITIKQHTVTTTTKGENFTETDVKMMERVVEQMCITQYERESQAYYQRGSSMVLFSSPPV

SEQ ID NO: 3952 - protein, 240 aa, synthetic construct
  REGION 1..240: note = Synthetic
MANLGCWMLVLFVATWSDLGLCKKRPKPGGWNTGGSRYPGQGSPGGNRYPPQGGGGWGQPHGGGWGQPHGGGWGQPHGGGWGQPHGGGWGQGGGTHSQWNKPSKPKTNMKHMAGAAAAGAVVGGLGGYMLVSAMSRPIIHFGSDYEDRYYRENMHRYPNQVYYRPMDEYSNQNNFVHDCVNITIKQHTVTTTTKGENFTETDVKMMERVVEQMCITQYERESQAYYQRGSSMVLFSSPPV

SEQ ID NO: 3953 - protein, 240 aa, synthetic construct
  REGION 1..240: note = Synthetic
MANLGCWMLVLFVATWSDLGLCKKRPKPGGWNTGGSRYPGQGSPGGNRYPPQGGGGWGQPHGGGWGQPHGGGWGQPHGGGWGQPHGGGWGQGGGTHSQWNKPSKPKTNMKHMAGAAAAGAVVGGLGGYMLGSAMSRPIIHFGSDYEDRYYRENMHRYPNQVYYRPMDEYSNQNNFGHDCVNITIKQHTVTTTTKGENFTETDVKMMERVVEQMCITQYERESQAYYQRGSSMVLFSSPPV

SEQ ID NO: 3954 - protein, 240 aa, synthetic construct
  REGION 1..240: note = Synthetic
MANLGCWMLVLFVATWSDLGLCKKRPKPGGWNTGGSRYPGQGSPGGNRYPPQGGGGWGQPHGGGWGQPHGGGWGQPHGGGWGQPHGGGWGQGGGTHSQWNKPSKPKTNMKHMAGAAAAGAVVGGLGGYMLGSAMSRPIIHFGSDYEDRYYRENMHRYPNQVYYRPMDEYSNQNNFVHDCVNITIKQRTVTTTTKGENFTETDVKMMERVVEQMCITQYERESQAYYQRGSSMVLFSSPPV

SEQ ID NO: 3955 - protein, 240 aa, synthetic construct
  REGION 1..240: note = Synthetic
MANLGCWMLVLFVATWSDLGLCKKRPKPGGWNTGGSRYPGQGSPGGNRYPPQGGGGWGQPHGGGWGQPHGGGWGQPHGGGWGQPHGGGWGQGGGTHSQWNKPSKPKTNMKHMAGAAAAGAVVGGLGGYMLGSAMSRPIIHFGSDYEDRYYRENMHRYPNQVYYRPMDEYSNQNNFVHDCVNITIKQHTVTTTTKGENSTETDVKMMERVVEQMCITQYERESQAYYQRGSSMVLFSSPPV

SEQ ID NO: 3956 - protein, 240 aa, synthetic construct
  REGION 1..240: note = Synthetic
MANLGCWMLVLFVATWSDLGLCKKRPKPGGWNTGGSRYPGQGSPGGNRYPPQGGGGWGQPHGGGWGQPHGGGWGQPHGGGWGQPHGGGWGQGGGTHSQWNKPSKPKTNMKHMAGAAAAGAVVGGLGGYMLGSAMSRPIIHFGSDYEDRYYRENMHRYPNQVYYRPMDEYSNQNNFVHDCVNITIKQHTVTTTTKGENFTETNVKMMERVVEQMCITQYERESQAYYQRGSSMVLFSSPPV

SEQ ID NO: 3957 - protein, 240 aa, synthetic construct
  REGION 1..240: note = Synthetic
MANLGCWMLVLFVATWSDLGLCKKRPKPGGWNTGGSRYPGQGSPGGNRYPPQGGGGWGQPHGGGWGQPHGGGWGQPHGGGWGQPHGGGWGQGGGTHSQWNKPSKPKTNMKHMAGAAAAGAVVGGLGGYMLGSAMSRPIIHFGSDYEDRYYRENMHRYPNQVYYRPMDEYSNQNNFVHDCVNITIKQHTVTTTTKGENFTETDVKMMERVVEPMCITQYERESQAYYQRGSSMVLFSSPPV

SEQ ID NO: 3958 - protein, 240 aa, synthetic construct
  REGION 1..240: note = Synthetic
MANLGCWMLVLFVATWSDLGLCKKRPKPGGWNTGGSRYPGQGSPGGNRYPPQGGGGWGQPHGGGWGQPHGGGWGQPHGGGWGQPHGGGWGQGGGTHSQWNKPSKPKTNMKHMAGAAAAGAVVGGLGGYMLGSAMSRPIIHFGSDYEDRYYRENMHRYPNQVYYRPMDEYSNQNNFVHDCVNITIKQHTVTTTTKGENFTETDVKMMERVVEQMCITRYERESQAYYQRGSSMVLFSSPPV

SEQ ID NO: 3959 - protein, 240 aa, synthetic construct
  REGION 1..240: note = Synthetic
MANLGCWMLVLFVATWSDLGLCKKRPKPGGWNTGGSRYPGQGSPGGNRYPPQGGGGWGQPHGGGWGQPHGGGWGQPHGGGWGQPHGGGWGQGGGTHSQWNKPSKPKTNMKHMAGAAAAGAVVGGLGGYMLGSAMSRPIIHFGSDYEDRYYRENMHRYPNQVYYRPMDEYSNQNNFVHDCVNITIKQHTVTTTTKGENFTETDVKMMERVVEQMCITQYERESQAYYQRGSSTVLFSSPPV

SEQ ID NO: 3960 - protein, 240 aa, synthetic construct
  REGION 1..240: note = Synthetic
MANLGCWMLVLFVATWSDLGLCKKRPKPGGWNTGGSRYPGQGSPGGNRYPPQGGGGWGQPHGGGWGQPHGGGWGQPHGGGWGQPHGGGWGQGGGTHSQWNKPSKPKTNMKHMAGAAAAGAVVGGLGSYMLGSAMSRPIIHFGSDYEDRYYRENMHRYPNQVYYRPMDEYSNQNNFVHDCVNITIKQHTVTTTTKGENFTETDVKMMERVVEQMCITQYERESQAYYQRGSSMVLFSSPPV

SEQ ID NO: 3961 - protein, 240 aa, synthetic construct
  REGION 1..240: note = Synthetic
MANLGCWMLVLFVATWSDLGLCKKRPKPGGWNTGGSRYPGQGSPGGNRYPPQGGGGWGQPHGGGWGQPHGGGWGQPHGGGWGQPHGGGWGQGGGTHSQWNKPSKPKTNMKHMAGAAAAGAVVGGLGVYMLGSAMSRPIIHFGSDYEDRYYRENMHRYPNQVYYRPMDEYSNQNNFVHDCVNITIKQHTVTTTTKGENFTETDVKMMERVVEQMCITQYERESQAYYQRGSSMVLFSSPPV

SEQ ID NO: 3962 - protein, 240 aa, synthetic construct
  REGION 1..240: note = Synthetic
MANLGCWMLVLFVATWSDLGLCKKRPKPGGWNTGGSRYPGQGSPGGNRYPPQGGGGWGQPHGGGWGQPHGGGWGQPHGGGWGQPHGGGWGQGGGTHSQWNKPSKPKTNMKHMAGAAAAGAVVGGLGGYVLGSAMSRPIIHFGSDYEDRYYRENMHRYPNQVYYRPMDEYSNQNNFVHDCVNITIKQHTVTTTTKGENFTETDVKMMERVVEQMCITQYERESQAYYQRGSSMVLFSSPPV

SEQ ID NO: 3963 - protein, 240 aa, synthetic construct
  REGION 1..240: note = Synthetic
MANLGCWMLVLFVATWSDLGLCKKRPKPGGWNTGGSRYPGQGSPGGNRYPPQGGGGWGQPHGGGWGQPHGGGWGQPHGGGWGQPHGGGWGQGGGTHSQWNKPSKPKTNMKHMAGAAAAGAVVGGLGGYMLGSAMSRPIIHFGSDYEDRYYRENMHRYPNQVYYRPMGEYSNQNNFVHDCVNITIKQHTVTTTTKGENFTETDVKMMERVVEQMCITQYERESQAYYQRGSSMVLFSSPPV

SEQ ID NO: 3964 - protein, 240 aa, synthetic construct
  REGION 1..240: note = Synthetic
MANLGCWMLVLFVATWSDLGLCKKRPKPGGWNTGGSRYPGQGSPGGNRYPPQGGGGWGQPHGGGWGQPHGGGWGQPHGGGWGQPHGGGWGQGGGTHSQWNKPSKPKTNMKHMAGAAAAGAVVGGLGGYMLGSAMSRPIIHFGSDYEDRYYRENMHRYPNQVYYRPMNEYSNQNNFVHDCVNITIKQHTVTTTTKGENFTETDVKMMERVVEQMCITQYERESQAYYQRGSSMVLFSSPPV

SEQ ID NO: 3965 - protein, 240 aa, synthetic construct
  REGION 1..240: note = Synthetic
MANLGCWMLVLFVATWSDLGLCKKRPKPGGWNTGGSRYPGQGSPGGNRYPPQGGGGWGQPHGGGWGQPHGGGWGQPHGGGWGQPHGGGWGQGGGTHSQWNKPSKPKTNMKHMAGAAAAGAVVGGLGGYMLGSAMSRPIIHFGSDYEDRYYRENMHRYPNQVYYRPMDEYSSQNNFVHDCVNITIKQHTVTTTTKGENFTETDVKMMERVVEQMCITQYERESQAYYQRGSSMVLFSSPPV

SEQ ID NO: 3966 - protein, 240 aa, synthetic construct
  REGION 1..240: note = Synthetic
MANLGCWMLVLFVATWSDLGLCKKRPKPGGWNTGGSRYPGQGSPGGNRYPPQGGGGWGQPHGGGWGQPHGGGWGQPHGGGWGQPHGGGWGQGGGTHSQWNKPSKPKTNMKHMAGAAAAGAVVGGLGGYMLGSAMSRPIIHFGSDYEDRYYRENMHRYPNQVYYRPMDEYSNQNNFVHDCVNITIKQHTVTTTTKGENFTETDVKMMERVVEQMCITQYKRESQAYYQRGSSMVLFSSPPV

SEQ ID NO: 3967 - protein, 240 aa, synthetic construct
  REGION 1..240: note = Synthetic
MANLGCWMLVLFVATWSDLGLCKKRPKPGGWNTGGSRYPGQGSPGGNRYPPQGGGGWGQPHGGGWGQPHGGGWGQPHGGGWGQPHGGGWGQGGGTHSQWNKPSKPKTNMKHMAGAAAAGAVVGGLGGYMLGSAMSRPIIHFGSDYEDRYYRENMHRYPNQVYYRPMDEYSNQNNFVHDCVNITIKQHTVTTTTKGENFTETDVKMMERVVEQMCITQYERESQAYYQRGSSMVLFSSSPV

SEQ ID NO: 3968 - protein, 5 aa, synthetic construct
  REGION 1..5: note = Synthetic
EAAAK

SEQ ID NO: 3969 - protein, 10 aa, synthetic construct
  REGION 1..10: note = Synthetic
EAAAKEAAAK

SEQ ID NO: 3970 - protein, 15 aa, synthetic construct
  REGION 1..15: note = Synthetic
EAAAKEAAAKEAAAK

SEQ ID NO: 3971 - DNA, 20 bp, synthetic construct
  misc_feature 1..20: note = Synthetic
  source 1..20: mol_type = other DNA
gattggctttgatttcccta

SEQ ID NO: 3972 - DNA, 20 bp, synthetic construct
  misc_feature 1..20: note = Synthetic
  source 1..20: mol_type = other DNA
gtatatgattgttactgaga

SEQ ID NO: 3973 - DNA, 20 bp, synthetic construct
  misc_feature 1..20: note = Synthetic
  source 1..20: mol_type = other DNA
gcagttgcctaagaactggt

SEQ ID NO: 3974 - DNA, 20 bp, synthetic construct
  misc_feature 1..20: note = Synthetic
  source 1..20: mol_type = other DNA
gaggagagtaaagtgattgg

SEQ ID NO: 3975 - DNA, 20 bp, synthetic construct
  misc_feature 1..20: note = Synthetic
  source 1..20: mol_type = other DNA
gcagagccaggaacccctgt

SEQ ID NO: 3976 - DNA, 20 bp, synthetic construct
  misc_feature 1..20: note = Synthetic
  source 1..20: mol_type = other DNA
gggaaggggcaggagagcca

SEQ ID NO: 3977 - DNA, 20 bp, synthetic construct
  misc_feature 1..20: note = Synthetic
  source 1..20: mol_type = other DNA
gaatatgtcccagatagcac

SEQ ID NO: 3978 - DNA, 20 bp, synthetic construct
  misc_feature 1..20: note = Synthetic
  source 1..20: mol_type = other DNA
ggggactctttaaggaaaga

SEQ ID NO: 3979 - DNA, 20 bp, synthetic construct
  misc_feature 1..20: note = Synthetic
  source 1..20: mol_type = other DNA
gagaaagagaaagggagtag

SEQ ID NO: 3980 - DNA, 20 bp, synthetic construct
  misc_feature 1..20: note = Synthetic
  source 1..20: mol_type = other DNA
gagtagaggcggccacgacc

SEQ ID NO: 3981 - DNA, 20 bp, synthetic construct
  misc_feature 1..20: note = Synthetic
  source 1..20: mol_type = other DNA
gatcagtgaaacgcaccaga

SEQ ID NO: 3982 - DNA, 20 bp, synthetic construct
  misc_feature 1..20: note = Synthetic
  source 1..20: mol_type = other DNA
gcagctcaggttctgggaga

SEQ ID NO: 3983 - DNA, 20 bp, synthetic construct
  misc_feature 1..20: note = Synthetic
  source 1..20: mol_type = other DNA
gtggccactgagaaccgggc

SEQ ID NO: 3984 - DNA, 20 bp, synthetic construct
  misc_feature 1..20: note = Synthetic
  source 1..20: mol_type = other DNA
gaatctgcctaacaggaggt

SEQ ID NO: 3985 - DNA, 20 bp, synthetic construct
  misc_feature 1..20: note = Synthetic
  source 1..20: mol_type = other DNA
gtcaccaatcctgtccctag

SEQ ID NO: 3986 - DNA, 20 bp, synthetic construct
  misc_feature 1..20: note = Synthetic
  source 1..20: mol_type = other DNA
gctggccccccaccgcccca

SEQ ID NO: 3987 - DNA, 20 bp, synthetic construct
  misc_feature 1..20: note = Synthetic
  source 1..20: mol_type = other DNA
gacgtcacggcgctgcccca

SEQ ID NO: 3988 - DNA, 20 bp, synthetic construct
  misc_feature 1..20: note = Synthetic
  source 1..20: mol_type = other DNA
ggtgtgctgggcaggtcgcg

SEQ ID NO: 3989 - DNA, 20 bp, synthetic construct
  misc_feature 1..20: note = Synthetic
  source 1..20: mol_type = other DNA
gtccttggcaagcccaggag

SEQ ID NO: 3990 - DNA, 20 bp, synthetic construct
  misc_feature 1..20: note = Synthetic
  source 1..20: mol_type = other DNA
gtgcgtcctaggtgttcacc

SEQ ID NO: 3991 - DNA, 20 bp, synthetic construct
  misc_feature 1..20: note = Synthetic
  source 1..20: mol_type = other DNA
gtcctggcagggctgtggtg

SEQ ID NO: 3992 - DNA, 20 bp, synthetic construct
  misc_feature 1..20: note = Synthetic
  source 1..20: mol_type = other DNA
gtgacctgcccggttctcag

SEQ ID NO: 3993 - DNA, 20 bp, synthetic construct
  misc_feature 1..20: note = Synthetic
  source 1..20: mol_type = other DNA
gagcttggcagggggtggga

SEQ ID NO: 3994 - DNA, 20 bp, synthetic construct
  misc_feature 1..20: note = Synthetic
  source 1..20: mol_type = other DNA
gagccagagaggatcctggg

SEQ ID NO: 3995 - DNA, 20 bp, synthetic construct
  misc_feature 1..20: note = Synthetic
  source 1..20: mol_type = other DNA
gatggagccagagaggatcc

SEQ ID NO: 3996 - DNA, 20 bp, synthetic construct
  misc_feature 1..20: note = Synthetic
  source 1..20: mol_type = other DNA
ggggccactagggacaggat

SEQ ID NO: 3997 - DNA, 20 bp, synthetic construct
  misc_feature 1..20: note = Synthetic
  source 1..20: mol_type = other DNA
gtcccctccaccccacagtg

SEQ ID NO: 3998 - DNA, 20 bp, synthetic construct
  misc_feature 1..20: note = Synthetic
  source 1..20: mol_type = other DNA
gggaccaccttatattccca

SEQ ID NO: 3999 - DNA, 20 bp, synthetic construct
  misc_feature 1..20: note = Synthetic
  source 1..20: mol_type = other DNA
gacctgcccagcacaccctg

SEQ ID NO: 4000 - DNA, 20 bp, synthetic construct
  misc_feature 1..20: note = Synthetic
  source 1..20: mol_type = other DNA
gcgactcctggaagtggcca

SEQ ID NO: 4001 - DNA, 20 bp, synthetic construct
  misc_feature 1..20: note = Synthetic
  source 1..20: mol_type = other DNA
ggacttcccagtgtgcatcg

SEQ ID NO: 4002 - DNA, 20 bp, synthetic construct
  misc_feature 1..20: note = Synthetic
  source 1..20: mol_type = other DNA
tttgcagtttatcaggatga

SEQ ID NO: 4003 - DNA, 20 bp, synthetic construct
  misc_feature 1..20: note = Synthetic
  source 1..20: mol_type = other DNA
ggttgagcaggtagatgtca

SEQ ID NO: 4004 - DNA, 20 bp, synthetic construct
  misc_feature 1..20: note = Synthetic
  source 1..20: mol_type = other DNA
ctgggcggcagcatagtgag

SEQ ID NO: 4005 - DNA, 20 bp, synthetic construct
  misc_feature 1..20: note = Synthetic
  source 1..20: mol_type = other DNA
gtcaagagttgacacattgt

SEQ ID NO: 4006 - DNA, 20 bp, synthetic construct
  misc_feature 1..20: note = Synthetic
  source 1..20: mol_type = other DNA
cccaagtgatcacacttgtc

SEQ ID NO: 4007 - DNA, 20 bp, synthetic construct
  misc_feature 1..20: note = Synthetic
  source 1..20: mol_type = other DNA
ccacccaagtgatcacactt

SEQ ID NO: 4008 - DNA, 20 bp, synthetic construct
  misc_feature 1..20: note = Synthetic
  source 1..20: mol_type = other DNA
gggagagacgcaaacacagc

SEQ ID NO: 4009 - DNA, 20 bp, synthetic construct
  misc_feature 1..20: note = Synthetic
  source 1..20: mol_type = other DNA
tctctgacctgtttttcctt

SEQ ID NO: 4010 - DNA, 20 bp, synthetic construct
  misc_feature 1..20: note = Synthetic
  source 1..20: mol_type = other DNA
tcttactgtccccttctggg

SEQ ID NO: 4011 - DNA, 20 bp, synthetic construct
  misc_feature 1..20: note = Synthetic
  source 1..20: mol_type = other DNA
tctgggctcactatgctgcc

SEQ ID NO: 4012 - DNA, 20 bp, synthetic construct
  misc_feature 1..20: note = Synthetic
  source 1..20: mol_type = other DNA
cccagtgggactttggaaat

SEQ ID NO: 4013 - DNA, 20 bp, synthetic construct
  misc_feature 1..20: note = Synthetic
  source 1..20: mol_type = other DNA
gtgggactttggaaatacaa

SEQ ID NO: 4014 - DNA, 20 bp, synthetic construct
  misc_feature 1..20: note = Synthetic
  source 1..20: mol_type = other DNA
cctgacaatcgataggtacc

SEQ ID NO: 4015 - DNA, 20 bp, synthetic construct
  misc_feature 1..20: note = Synthetic
  source 1..20: mol_type = other DNA
ggaatcatctttaccagatc

SEQ ID NO: 4016 - DNA, 20 bp, synthetic construct
  misc_feature 1..20: note = Synthetic
  source 1..20: mol_type = other DNA
gcagctctcattttccatac

SEQ ID NO: 4017 - DNA, 20 bp, synthetic construct
  misc_feature 1..20: note = Synthetic
  source 1..20: mol_type = other DNA
tacagtcagtatcaattctg

SEQ ID NO: 4018 - DNA, 20 bp, synthetic construct
  misc_feature 1..20: note = Synthetic
  source 1..20: mol_type = other DNA
gactgaaacttcacagaata

SEQ ID NO: 4019 - DNA, 21 bp, synthetic construct
  misc_feature 1..21: note = Synthetic
  source 1..21: mol_type = other DNA
gatttatgagatcaacagcac

SEQ ID NO: 4020 - DNA, 21 bp, synthetic construct
  misc_feature 1..21: note = Synthetic
  source 1..21: mol_type = other DNA
gacaccaaaaactgccacagg

SEQ ID NO: 4021 - DNA, 21 bp, synthetic construct
  misc_feature 1..21: note = Synthetic
  source 1..21: mol_type = other DNA
gcactcatttcctccaagctc

SEQ ID NO: 4022 - DNA, 20 bp, synthetic construct
  misc_feature 1..20: note = Synthetic
  source 1..20: mol_type = other DNA
gtaggtacaggacagggcag

SEQ ID NO: 4023 - DNA, 21 bp, synthetic construct
  misc_feature 1..21: note = Synthetic
  source 1..21: mol_type = other DNA
gagataggtaggtacaggaca

SEQ ID NO: 4024 - DNA, 20 bp, synthetic construct
  misc_feature 1..20: note = Synthetic
  source 1..20: mol_type = other DNA
gtgaaaagataggtaggtac

SEQ ID NO: 4025 - DNA, 20 bp, synthetic construct
  misc_feature 1..20: note = Synthetic
  source 1..20: mol_type = other DNA
gttatggtttactccatcta

SEQ ID NO: 4026 - DNA, 20 bp, synthetic construct
  misc_feature 1..20: note = Synthetic
  source 1..20: mol_type = other DNA
gttttggtttaccctatcta

SEQ ID NO: 4027 - DNA, 21 bp, synthetic construct
  misc_feature 1..21: note = Synthetic
  source 1..21: mol_type = other DNA
gctgtggaactgcaacacact

SEQ ID NO: 4028 - DNA, 21 bp, synthetic construct
  misc_feature 1..21: note = Synthetic
  source 1..21: mol_type = other DNA
gtgccacctaacagtgagctg

SEQ ID NO: 4029 - DNA, 51 bp, synthetic construct
  misc_feature 1..51: note = Synthetic
  source 1..51: mol_type = other DNA
atgatcctgacgacggagaccgccgtcgtcgacaagcccgtgctcagtctg

SEQ ID NO: 4030 - DNA, 47 bp, synthetic construct
  misc_feature 1..47: note = Synthetic
  source 1..47: mol_type = other DNA
tcctgacgacggagaccgccgtcgtcgacaagcccgtgctcagtctg

SEQ ID NO: 4031 - DNA, 43 bp, synthetic construct
  misc_feature 1..43: note = Synthetic
  source 1..43: mol_type = other DNA
gacgacggagaccgccgtcgtcgacaagcccgtgctcagtctg

SEQ ID NO: 4032 - DNA, 50 bp, synthetic construct
  misc_feature 1..50: note = Synthetic
  source 1..50: mol_type = other DNA
ggcttgtcgacgacggcggtctccgtcgtcaggatcatccgggatactgg

SEQ ID NO: 4033 - DNA, 46 bp, synthetic construct
  misc_feature 1..46: note = Synthetic
  source 1..46: mol_type = other DNA
tgtcgacgacggcggtctccgtcgtcaggatcatccgggatactgg

SEQ ID NO: 4034 - DNA, 42 bp, synthetic construct
  misc_feature 1..42: note = Synthetic
  source 1..42: mol_type = other DNA
gacgacggcggtctccgtcgtcaggatcatccgggatactgg

SEQ ID NO: 4035 - DNA, 56 bp, synthetic construct
  misc_feature 1..56: note = Synthetic
  source 1..56: mol_type = other DNA
taccgtacaccactgagaccgcggtggttgaccagacaaacctcgtgctcagtctg

SEQ ID NO: 4036 - DNA, 52 bp, synthetic construct
  misc_feature 1..52: note = Synthetic
  source 1..52: mol_type = other DNA
gtacaccactgagaccgcggtggttgaccagacaaacctcgtgctcagtctg

SEQ ID NO: 4037 - DNA, 48 bp, synthetic construct
  misc_feature 1..48: note = Synthetic
  source 1..48: mol_type = other DNA
accactgagaccgcggtggttgaccagacaaacctcgtgctcagtctg

SEQ ID NO: 4038 - DNA, 56 bp, synthetic construct
  misc_feature 1..56: note = Synthetic
  source 1..56: mol_type = other DNA
gtctggtcaaccaccgcggtctcagtggtgtacggtacaaacctccgggatactgg

SEQ ID NO: 4039 - DNA, 52 bp, synthetic construct
  misc_feature 1..52: note = Synthetic
  source 1..52: mol_type = other DNA
ggtcaaccaccgcggtctcagtggtgtacggtacaaacctccgggatactgg

SEQ ID NO: 4040 - DNA, 48 bp, synthetic construct
  misc_feature 1..48: note = Synthetic
  source 1..48: mol_type = other DNA
aaccaccgcggtctcagtggtgtacggtacaaacctccgggatactgg

SEQ ID NO: 4041 - DNA, 59 bp, synthetic construct
  misc_feature 1..59: note = Synthetic
  source 1..59: mol_type = other DNA
tggaggaagcagggcttcctttcctctgccatcacacctgcactcccgtgctcagtctg

SEQ ID NO: 4042 - DNA, 83 bp, synthetic construct
  misc_feature 1..83: note = Synthetic
  source 1..83: mol_type = other DNA
tggaggaagcagggcttcctttcctctgccatcacccgtctcctggggagatggtttccacctgcactcccgtgctcagtctg

SEQ ID NO: 4043 - DNA, 155 bp, synthetic construct
  misc_feature 1..155: note = Synthetic
  source 1..155: mol_type = other DNA
tggaggaagcagggcttcctttcctctgccatcaaaatttctttccatcttcaagcatcccggtgtagtgcaccacgcaggtctggccgcgcttggggaaggtgcgcccgtctcctggggagatggtttccacctgcactcccgtgctcagtctg

SEQ ID NO: 4044 - DNA, 368 bp, synthetic construct
  misc_feature 1..368: note = Synthetic
  source 1..368: mol_type = other DNA
tggaggaagcagggcttcctttcctctgccatcattccagttttagaagctccacatcgaagacgagagtggcatgtggtgggatgatgcctgggtgcccagtggcaccataggcataatctggagatatagtcagtttggctctctgacccacactcatctgggcaaccccttcttcccagcctcggatcacctcctgcttgcctagcataaacttaaagggcttgtttctgtcccgggaggaatcaaatttctttccatcttcaagcatcccggtgtagtgcaccacgcaggtctggccgcgcttggggaaggtgcgcccgtctcctggggagatggtttccacctgcactcccgtgctcagtctg

SEQ ID NO: 4045 - DNA, 84 bp, synthetic construct
  misc_feature 1..84: note = Synthetic
  source 1..84: mol_type = other DNA
accacgcaggtctggccgcgcttggggaaggtgcgcccgtctcctggggagatggtttccacctgcactcccgtgctcagtctg

SEQ ID NO: 4046 - DNA, 81 bp, synthetic construct
  misc_feature 1..81: note = Synthetic
  source 1..81: mol_type = other DNA
accttccccaagcgcggccagacctgcgtggtgcactacaccgggatgcttgaagatggaaagaaatttccgggatactgg

SEQ ID NO: 4047 - DNA, 26 bp, synthetic construct
  misc_feature 1..26: note = Synthetic
  source 1..26: mol_type = other DNA
tcctctgccatcacgtgctcagtctg

SEQ ID NO: 4048 - DNA, 25 bp, synthetic construct
  misc_feature 1..25: note = Synthetic
  source 1..25: mol_type = other DNA
tgatggcagaggaccgggatactgg

SEQ ID NO: 4049 - DNA, 47 bp, synthetic construct
  misc_feature 1..47: note = Synthetic
  source 1..47: mol_type = other DNA
tggaggaagcagggcttcctttcctctgccatcacgtgctcagtctg

SEQ ID NO: 4050 - DNA, 46 bp, synthetic construct
  misc_feature 1..46: note = Synthetic
  source 1..46: mol_type = other DNA
tgatggcagaggaaaggaagccctgcttcctccaccgggatactgg

SEQ ID NO: 4051 - DNA, 39 bp, synthetic construct
  misc_feature 1..39: note = Synthetic
  source 1..39: mol_type = other DNA
tgcaggagctgcatcctctgccatcacgtgctcagtctg

SEQ ID NO: 4052 - DNA, 38 bp, synthetic construct
  misc_feature 1..38: note = Synthetic
  source 1..38: mol_type = other DNA
tgatggcagaggatgcagctcctgcaccgggatactgg

SEQ ID NO: 4053 - DNA, 44 bp, synthetic construct
  misc_feature 1..44: note = Synthetic
  source 1..44: mol_type = other DNA
gcccagccaaacttgtcaaccagtatcccggcgtgctcagtctg

SEQ ID NO: 4054 - DNA, 43 bp, synthetic construct
  misc_feature 1..43: note = Synthetic
  source 1..43: mol_type = other DNA
gggtcaatccttggggcccagactgagcacgccgggatactgg

SEQ ID NO: 4055 - DNA, 71 bp, synthetic construct
  misc_feature 1..71: note = Synthetic
  source 1..71: mol_type = other DNA
tcctctgccatcacgtgctcagtctgttaaataacgcggttctatctagttacgcgttaaaccaactagaa

SEQ ID NO: 4056 - DNA, 70 bp, synthetic construct
  misc_feature 1..70: note = Synthetic
  source 1..70: mol_type = other DNA
tgatggcagaggaccgggatactggaaaatatacgcggttctatctagttacgcgttaaaccaactagaa

SEQ ID NO: 4057 - DNA, 92 bp, synthetic construct
  misc_feature 1..92: note = Synthetic
  source 1..92: mol_type = other DNA
tggaggaagcagggcttcctttcctctgccatcacgtgctcagtctgttaataatcgcggttctatctagttacgcgttaaaccaactagaa

SEQ ID NO: 4058 - DNA, 91 bp, synthetic construct
  misc_feature 1..91: note = Synthetic
  source 1..91: mol_type = other DNA
tgatggcagaggaaaggaagccctgcttcctccaccgggatactggaaaaaaaacgcggttctatctagttacgcgttaaaccaactagaa

SEQ ID NO: 4059 - DNA, 84 bp, synthetic construct
  misc_feature 1..84: note = Synthetic
  source 1..84: mol_type = other DNA
tgcaggagctgcatcctctgccatcacgtgctcagtctgataaataacgcggttctatctagttacgcgttaaaccaactagaa

SEQ ID NO: 4060 - DNA, 83 bp, synthetic construct
  misc_feature 1..83: note = Synthetic
  source 1..83: mol_type = other DNA
tgatggcagaggatgcagctcctgcaccgggatactggaaaaaaggcgcggttctatctagttacgcgttaaaccaactagaa

SEQ ID NO: 4061 - DNA, 89 bp, synthetic construct
  misc_feature 1..89: note = Synthetic
  source 1..89: mol_type = other DNA
gcccagccaaacttgtcaaccagtatcccggcgtgctcagtctgttaaataccgcggttctatctagttacgcgttaaaccaactagaa

SEQ ID NO: 4062 - DNA, 88 bp, synthetic construct
  misc_feature 1..88: note = Synthetic
  source 1..88: mol_type = other DNA
gggtcaatccttggggcccagactgagcacgccgggatactggaaaataatcgcggttctatctagttacgcgttaaaccaactagaa

SEQ ID NO: 4063 - DNA, 47 bp, synthetic construct
  misc_feature 1..47: note = Synthetic
  source 1..47: mol_type = other DNA
ttgaataggaagtaaattaatttgaagctggaccctagggaaatcaa

SEQ ID NO: 4064 - DNA, 49 bp, synthetic construct
  misc_feature 1..49: note = Synthetic
  source 1..49: mol_type = other DNA
ttgaataggaagtaaattaatttgaagctggaccctagggaaatcaaag

SEQ ID NO: 4065 - DNA, 51 bp, synthetic construct
  misc_feature 1..51: note = Synthetic
  source 1..51: mol_type = other DNA
ttgaataggaagtaaattaatttgaagctggaccctagggaaatcaaagcc

SEQ ID NO: 4066 - DNA, 48 bp, synthetic construct
  misc_feature 1..48: note = Synthetic
  source 1..48: mol_type = other DNA
tagggtccagcttcaaattaatttacttcctattcaaagttcttaggc

SEQ ID NO: 4067 - DNA, 50 bp, synthetic construct
  misc_feature 1..50: note = Synthetic
  source 1..50: mol_type = other DNA
tagggtccagcttcaaattaatttacttcctattcaaagttcttaggcaa

SEQ ID NO: 4068 - DNA, 50 bp, synthetic construct
  misc_feature 1..50: note = Synthetic
  source 1..50: mol_type = other DNA
atgcctggacaagtaacttaagttaaataagccttctcagtaacaatcat

SEQ ID NO: 4069 - DNA, 46 bp, synthetic construct
  misc_feature 1..46: note = Synthetic
  source 1..46: mol_type = other DNA
agaaggcttatttaacttaagttacttgtccaggcatagttcttag

SEQ ID NO: 4070 - DNA, 40 bp, synthetic construct
  misc_feature 1..40: note = Synthetic
  source 1..40: mol_type = other DNA
tgctgagagagaaacagttgcctaagaactcagtaacaat

SEQ ID NO: 4071 - DNA, 41 bp, synthetic construct
  misc_feature 1..41: note = Synthetic
  source 1..41: mol_type = other DNA
accacttccacaatgtatatgattgttactgagttcttagg

SEQ ID NO: 4072 - DNA, 44 bp, synthetic construct
  misc_feature 1..44: note = Synthetic
  source 1..44: mol_type = other DNA
accacttccacaatgtatatgattgttactgagttcttaggcaa

SEQ ID NO: 4073 - DNA, 49 bp, synthetic construct
  misc_feature 1..49: note = Synthetic
  source 1..49: mol_type = other DNA
atgatcctgacgacggagaccgccgtcgtcgacaagcccagtaacaatc

SEQ ID NO: 4074 - DNA, 52 bp, synthetic construct
  misc_feature 1..52: note = Synthetic
  source 1..52: mol_type = other DNA
atgatcctgacgacggagaccgccgtcgtcgacaagcccagtaacaatcata

SEQ ID NO: 4075 - DNA, 49 bp, synthetic construct
  misc_feature 1..49: note = Synthetic
  source 1..49: mol_type = other DNA
ggcttgtcgacgacggcggtctccgtcgtcaggatcatagttcttaggc

SEQ ID NO: 4076 - DNA, 52 bp, synthetic construct
  misc_feature 1..52: note = Synthetic
  source 1..52: mol_type = other DNA
ggcttgtcgacgacggcggtctccgtcgtcaggatcatagttcttaggcaac

SEQ ID NO: 4077 - DNA, 50 bp, synthetic construct
  misc_feature 1..50: note = Synthetic
  source 1..50: mol_type = other DNA
ggcttgtcgacgacggcggtctccgtcgtcaggatcatatcactttactc

SEQ ID NO: 4078 - DNA, 53 bp, synthetic construct
  misc_feature 1..53: note = Synthetic
  source 1..53: mol_type = other DNA
ggcttgtcgacgacggcggtctccgtcgtcaggatcatatcactttactctcc

SEQ ID NO: 4079 - DNA, 52 bp, synthetic construct
  misc_feature 1..52: note = Synthetic
  source 1..52: mol_type = other DNA
taccgtacaccactgagaccgcggtggttgaccagacaaacctggggttcct

SEQ ID NO: 4080 - DNA, 54 bp, synthetic construct
  misc_feature 1..54: note = Synthetic
  source 1..54: mol_type = other DNA
taccgtacaccactgagaccgcggtggttgaccagacaaacctggggttcctgg

SEQ ID NO: 4081 - DNA, 56 bp, synthetic construct
  misc_feature 1..56: note = Synthetic
  source 1..56: mol_type = other DNA
taccgtacaccactgagaccgcggtggttgaccagacaaacctggggttcctggct

SEQ ID NO: 4082 - DNA, 52 bp, synthetic construct
  misc_feature 1..52: note = Synthetic
  source 1..52: mol_type = other DNA
taccgtacaccactgagaccgcggtggttgaccagacaaacctctctcctgc

SEQ ID NO: 4083 - DNA, 54 bp, synthetic construct
  misc_feature 1..54: note = Synthetic
  source 1..54: mol_type = other DNA
taccgtacaccactgagaccgcggtggttgaccagacaaacctctctcctgccc

SEQ ID NO: 4084 - DNA, 56 bp, synthetic construct
  misc_feature 1..56: note = Synthetic
  source 1..56: mol_type = other DNA
taccgtacaccactgagaccgcggtggttgaccagacaaacctctctcctgcccct

SEQ ID NO: 4085 - DNA, 52 bp, synthetic construct
  misc_feature 1..52: note = Synthetic
  source 1..52: mol_type = other DNA
taccgtacaccactgagaccgcggtggttgaccagacaaacctctatctggg

SEQ ID NO: 4086 - DNA, 54 bp, synthetic construct
  misc_feature 1..54: note = Synthetic
  source 1..54: mol_type = other DNA
taccgtacaccactgagaccgcggtggttgaccagacaaacctctatctgggac

SEQ ID NO: 4087 - DNA, 56 bp, synthetic construct
  misc_feature 1..56: note = Synthetic
  source 1..56: mol_type = other DNA
taccgtacaccactgagaccgcggtggttgaccagacaaacctctatctgggacat

SEQ ID NO: 4088 - DNA, 52 bp, synthetic construct
  misc_feature 1..52: note = Synthetic
  source 1..52: mol_type = other DNA
taccgtacaccactgagaccgcggtggttgaccagacaaacctttccttaaa

SEQ ID NO: 4089 - DNA, 54 bp, synthetic construct
  misc_feature 1..54: note = Synthetic
  source 1..54: mol_type = other DNA
taccgtacaccactgagaccgcggtggttgaccagacaaacctttccttaaaga

SEQ ID NO: 4090 - DNA, 56 bp, synthetic construct
  misc_feature 1..56: note = Synthetic
  source 1..56: mol_type = other DNA
taccgtacaccactgagaccgcggtggttgaccagacaaacctttccttaaagagt

SEQ ID NO: 4091 - DNA, 52 bp, synthetic construct
  misc_feature 1..52: note = Synthetic
  source 1..52: mol_type = other DNA
taccgtacaccactgagaccgcggtggttgaccagacaaacctctccctttc

SEQ ID NO: 4092 - DNA, 54 bp, synthetic construct
  misc_feature 1..54: note = Synthetic
  source 1..54: mol_type = other DNA
taccgtacaccactgagaccgcggtggttgaccagacaaacctctccctttctc

SEQ ID NO: 4093 - DNA, 56 bp, synthetic construct
  misc_feature 1..56: note = Synthetic
  source 1..56: mol_type = other DNA
taccgtacaccactgagaccgcggtggttgaccagacaaacctctccctttctctt

SEQ ID NO: 4094 - DNA, 52 bp, synthetic construct
  misc_feature 1..52: note = Synthetic
  source 1..52: mol_type = other DNA
taccgtacaccactgagaccgcggtggttgaccagacaaacctcgtggccgc

SEQ ID NO: 4095 - DNA, 54 bp, synthetic construct
  misc_feature 1..54: note = Synthetic
  source 1..54: mol_type = other DNA
taccgtacaccactgagaccgcggtggttgaccagacaaacctcgtggccgcct

SEQ ID NO: 4096 - DNA, 56 bp, synthetic construct
  misc_feature 1..56: note = Synthetic
  source 1..56: mol_type = other DNA
taccgtacaccactgagaccgcggtggttgaccagacaaacctcgtggccgcctct

SEQ ID NO: 4097 - DNA, 52 bp, synthetic construct
  misc_feature 1..52: note = Synthetic
  source 1..52: mol_type = other DNA
taccgtacaccactgagaccgcggtggttgaccagacaaacctggtgcgttt

SEQ ID NO: 4098 - DNA, 54 bp, synthetic construct
  misc_feature 1..54: note = Synthetic
  source 1..54: mol_type = other DNA
taccgtacaccactgagaccgcggtggttgaccagacaaacctggtgcgtttca

SEQ ID NO: 4099 - DNA, 56 bp, synthetic construct
  misc_feature 1..56: note = Synthetic
  source 1..56: mol_type = other DNA
taccgtacaccactgagaccgcggtggttgaccagacaaacctggtgcgtttcact

SEQ ID NO: 4100 - DNA, 52 bp, synthetic construct
  misc_feature 1..52: note = Synthetic
  source 1..52: mol_type = other DNA
taccgtacaccactgagaccgcggtggttgaccagacaaacctcccagaacc

SEQ ID NO: 4101 - DNA, 54 bp, synthetic construct
  misc_feature 1..54: note = Synthetic
  source 1..54: mol_type = other DNA
taccgtacaccactgagaccgcggtggttgaccagacaaacctcccagaacctg

SEQ ID NO: 4102 - DNA, 56 bp, synthetic construct
  misc_feature 1..56: note = Synthetic
  source 1..56: mol_type = other DNA
taccgtacaccactgagaccgcggtggttgaccagacaaacctcccagaacctgag

SEQ ID NO: 4103 - DNA, 52 bp, synthetic construct
  misc_feature 1..52: note = Synthetic
  source 1..52: mol_type = other DNA
taccgtacaccactgagaccgcggtggttgaccagacaaacctcggttctca

SEQ ID NO: 4104 - DNA, 54 bp, synthetic construct
  misc_feature 1..54: note = Synthetic
  source 1..54: mol_type = other DNA
taccgtacaccactgagaccgcggtggttgaccagacaaacctcggttctcagt

SEQ ID NO: 4105 - DNA, 56 bp, synthetic construct
  misc_feature 1..56: note = Synthetic
  source 1..56: mol_type = other DNA
taccgtacaccactgagaccgcggtggttgaccagacaaacctcggttctcagtgg

SEQ ID NO: 4106 - DNA, 52 bp, synthetic construct
  misc_feature 1..52: note = Synthetic
  source 1..52: mol_type = other DNA
taccgtacaccactgagaccgcggtggttgaccagacaaaccttcctgttag

SEQ ID NO: 4107 - DNA, 54 bp, synthetic construct
  misc_feature 1..54: note = Synthetic
  source 1..54: mol_type = other DNA
taccgtacaccactgagaccgcggtggttgaccagacaaaccttcctgttaggc

SEQ ID NO: 4108 - DNA, 56 bp, synthetic construct
  misc_feature 1..56: note = Synthetic
  source 1..56: mol_type = other DNA
taccgtacaccactgagaccgcggtggttgaccagacaaaccttcctgttaggcag

SEQ ID NO: 4109 - DNA, 52 bp, synthetic construct
  misc_feature 1..52: note = Synthetic
  source 1..52: mol_type = other DNA
taccgtacaccactgagaccgcggtggttgaccagacaaacctgggacagga

SEQ ID NO: 4110 - DNA, 54 bp, synthetic construct
  misc_feature 1..54: note = Synthetic
  source 1..54: mol_type = other DNA
taccgtacaccactgagaccgcggtggttgaccagacaaacctgggacaggatt

SEQ ID NO: 4111 - DNA, 56 bp, synthetic construct
  misc_feature 1..56: note = Synthetic
  source 1..56: mol_type = other DNA
taccgtacaccactgagaccgcggtggttgaccagacaaacctgggacaggattgg

SEQ ID NO: 4112 - DNA, 52 bp, synthetic construct
  misc_feature 1..52: note = Synthetic
  source 1..52: mol_type = other DNA
taccgtacaccactgagaccgcggtggttgaccagacaaacctggcggtggg

SEQ ID NO: 4113 - DNA, 54 bp, synthetic construct
  misc_feature 1..54: note = Synthetic
  source 1..54: mol_type = other DNA
taccgtacaccactgagaccgcggtggttgaccagacaaacctggcggtggggg

SEQ ID NO: 4114 - DNA, 56 bp, synthetic construct
  misc_feature 1..56: note = Synthetic
  source 1..56: mol_type = other DNA
taccgtacaccactgagaccgcggtggttgaccagacaaacctggcggtggggggc

SEQ ID NO: 4115 - DNA, 52 bp, synthetic construct
  misc_feature 1..52: note = Synthetic
  source 1..52: mol_type = other DNA
taccgtacaccactgagaccgcggtggttgaccagacaaacctggcagcgcc

SEQ ID NO: 4116 - DNA, 54 bp, synthetic construct
  misc_feature 1..54: note = Synthetic
  source 1..54: mol_type = other DNA
taccgtacaccactgagaccgcggtggttgaccagacaaacctggcagcgccgt

SEQ ID NO: 4117 - DNA, 56 bp, synthetic construct
  misc_feature 1..56: note = Synthetic
  source 1..56: mol_type = other DNA
taccgtacaccactgagaccgcggtggttgaccagacaaacctggcagcgccgtga

SEQ ID NO: 4118 - DNA, 52 bp, synthetic construct
  misc_feature 1..52: note = Synthetic
  source 1..52: mol_type = other DNA
taccgtacaccactgagaccgcggtggttgaccagacaaacctgacctgccc

SEQ ID NO: 4119 - DNA, 54 bp, synthetic construct
  misc_feature 1..54: note = Synthetic
  source 1..54: mol_type = other DNA
taccgtacaccactgagaccgcggtggttgaccagacaaacctgacctgcccag

SEQ ID NO: 4120 - DNA, 56 bp, synthetic construct
  misc_feature 1..56: note = Synthetic
  source 1..56: mol_type = other DNA
taccgtacaccactgagaccgcggtggttgaccagacaaacctgacctgcccagca

SEQ ID NO: 4121 - DNA, 53 bp, synthetic construct
  misc_feature 1..53: note = Synthetic
  source 1..53: mol_type = other DNA
gtctggtcaaccaccgcggtctcagtggtgtacggtacaaacctctgggcttg

SEQ ID NO: 4122 - DNA, 55 bp, synthetic construct
  misc_feature 1..55: note = Synthetic
  source 1..55: mol_type = other DNA
gtctggtcaaccaccgcggtctcagtggtgtacggtacaaacctctgggcttgcc

SEQ ID NO: 4123 - DNA, 57 bp, synthetic construct
  misc_feature 1..57: note = Synthetic
  source 1..57: mol_type = other DNA
ctctggtcaaccaccgcggtctcagtggtgtacggtacaaacctctgggcttgccaa

SEQ ID NO: 4124 - DNA, 53 bp, synthetic construct
  misc_feature 1..53: note = Synthetic
  source 1..53: mol_type = other DNA
gtctggtcaaccaccgcggtctcagtggtgtacggtacaaacctgaacaccta

SEQ ID NO: 4125 - DNA, 55 bp, synthetic construct
  misc_feature 1..55: note = Synthetic
  source 1..55: mol_type = other DNA
gtctggtcaaccaccgcggtctcagtggtgtacggtacaaacctgaacacctagg

SEQ ID NO: 4126 - DNA, 56 bp, synthetic construct
  misc_feature 1..56: note = Synthetic
  source 1..56: mol_type = other DNA
tctggtcaaccaccgcggtctcagtggtgtacggtacaaacctgaacacctaggac

SEQ ID NO: 4127 - DNA, 53 bp, synthetic construct
  misc_feature 1..53: note = Synthetic
  source 1..53: mol_type = other DNA
gtctggtcaaccaccgcggtctcagtggtgtacggtacaaacctcacagccct

SEQ ID NO: 4128 - DNA, 55 bp, synthetic construct
  misc_feature 1..55: note = Synthetic
  source 1..55: mol_type = other DNA
gtctggtcaaccaccgcggtctcagtggtgtacggtacaaacctcacagccctgc

SEQ ID NO: 4129 - DNA, 56 bp, synthetic construct
  misc_feature 1..56: note = Synthetic
  source 1..56: mol_type = other DNA
tctggtcaaccaccgcggtctcagtggtgtacggtacaaacctcacagccctgcca

SEQ ID NO: 4130 - DNA, 53 bp, synthetic construct
  misc_feature 1..53: note = Synthetic
  source 1..53: mol_type = other DNA
gtctggtcaaccaccgcggtctcagtggtgtacggtacaaacctagaaccggg

SEQ ID NO: 4131 - DNA, 55 bp, synthetic construct
  misc_feature 1..55: note = Synthetic
  source 1..55: mol_type = other DNA
gtctggtcaaccaccgcggtctcagtggtgtacggtacaaacctagaaccgggca

SEQ ID NO: 4132 - DNA, 56 bp, synthetic construct
  misc_feature 1..56: note = Synthetic
  source 1..56: mol_type = other DNA
tctggtcaaccaccgcggtctcagtggtgtacggtacaaacctagaaccgggcagg

SEQ ID NO: 4133 - DNA, 53 bp, synthetic construct
  misc_feature 1..53: note = Synthetic
  source 1..53: mol_type = other DNA
gtctggtcaaccaccgcggtctcagtggtgtacggtacaaacctcaccccctg

SEQ ID NO: 4134 - DNA, 55 bp, synthetic construct
  misc_feature 1..55: note = Synthetic
  source 1..55: mol_type = other DNA
gtctggtcaaccaccgcggtctcagtggtgtacggtacaaacctcaccccctgcc

SEQ ID NO: 4135 - DNA, 56 bp, synthetic construct
  misc_feature 1..56: note = Synthetic
  source 1..56: mol_type = other DNA
tctggtcaaccaccgcggtctcagtggtgtacggtacaaacctcaccccctgccaa

SEQ ID NO: 4136 - DNA, 53 bp, synthetic construct
  misc_feature 1..53: note = Synthetic
  source 1..53: mol_type = other DNA
gtctggtcaaccaccgcggtctcagtggtgtacggtacaaacctaggatcctc

SEQ ID NO: 4137 - DNA, 55 bp, synthetic construct
  misc_feature 1..55: note = Synthetic
  source 1..55: mol_type = other DNA
gtctggtcaaccaccgcggtctcagtggtgtacggtacaaacctaggatcctctc

SEQ ID NO: 4138 - DNA, 56 bp, synthetic construct
  misc_feature 1..56: note = Synthetic
  source 1..56: mol_type = other DNA
tctggtcaaccaccgcggtctcagtggtgtacggtacaaacctaggatcctctctg

SEQ ID NO: 4139 - DNA, 53 bp, synthetic construct
  misc_feature 1..53: note = Synthetic
  source 1..53: mol_type = other DNA
gtctggtcaaccaccgcggtctcagtggtgtacggtacaaaccttcctctctg

SEQ ID NO: 4140 - DNA, 55 bp, synthetic construct
  misc_feature 1..55: note = Synthetic
  source 1..55: mol_type = other DNA
gtctggtcaaccaccgcggtctcagtggtgtacggtacaaaccttcctctctggc

SEQ ID NO: 4141 - DNA, 56 bp, synthetic construct
  misc_feature 1..56: note = Synthetic
  source 1..56: mol_type = other DNA
tctggtcaaccaccgcggtctcagtggtgtacggtacaaaccttcctctctggctc

SEQ ID NO: 4142 - DNA, 53 bp, synthetic construct
  misc_feature 1..53: note = Synthetic
  source 1..53: mol_type = other DNA
gtctggtcaaccaccgcggtctcagtggtgtacggtacaaacctctgtcccta

SEQ ID NO: 4143 - DNA, 55 bp, synthetic construct
  misc_feature 1..55: note = Synthetic
  source 1..55: mol_type = other DNA
gtctggtcaaccaccgcggtctcagtggtgtacggtacaaacctctgtccctagt

SEQ ID NO: 4144 - DNA, 56 bp, synthetic construct
  misc_feature 1..56: note = Synthetic
  source 1..56: mol_type = other DNA
tctggtcaaccaccgcggtctcagtggtgtacggtacaaacctctgtccctagtgg

SEQ ID NO: 4145 - DNA, 53 bp, synthetic construct
  misc_feature 1..53: note = Synthetic
  source 1..53: mol_type = other DNA
gtctggtcaaccaccgcggtctcagtggtgtacggtacaaaccttgtggggtg

SEQ ID NO: 4146 - DNA, 55 bp, synthetic construct
  misc_feature 1..55: note = Synthetic
  source 1..55: mol_type = other DNA
gtctggtcaaccaccgcggtctcagtggtgtacggtacaaaccttgtggggtgga

SEQ ID NO: 4147 - DNA, 56 bp, synthetic construct
  misc_feature 1..56: note = Synthetic
  source 1..56: mol_type = other DNA
tctggtcaaccaccgcggtctcagtggtgtacggtacaaaccttgtggggtggagg

SEQ ID NO: 4148 - DNA, 53 bp, synthetic construct
  misc_feature 1..53: note = Synthetic
  source 1..53: mol_type = other DNA
gtctggtcaaccaccgcggtctcagtggtgtacggtacaaacctgaatataag

SEQ ID NO: 4149 - DNA, 55 bp, synthetic construct
  misc_feature 1..55: note = Synthetic
  source 1..55: mol_type = other DNA
gtctggtcaaccaccgcggtctcagtggtgtacggtacaaacctgaatataaggt

SEQ ID NO: 4150 - DNA, 56 bp, synthetic construct
  misc_feature 1..56: note = Synthetic
  source 1..56: mol_type = other DNA
tctggtcaaccaccgcggtctcagtggtgtacggtacaaacctgaatataaggtgg

SEQ ID NO: 4151 - DNA, 53 bp, synthetic construct
  misc_feature 1..53: note = Synthetic
  source 1..53: mol_type = other DNA
gtctggtcaaccaccgcggtctcagtggtgtacggtacaaacctggtgtgctg

SEQ ID NO: 4152 - DNA, 55 bp, synthetic construct
  misc_feature 1..55: note = Synthetic
  source 1..55: mol_type = other DNA
gtctggtcaaccaccgcggtctcagtggtgtacggtacaaacctggtgtgctggg

SEQ ID NO: 4153 - DNA, 56 bp, synthetic construct
  misc_feature 1..56: note = Synthetic
  source 1..56: mol_type = other DNA
tctggtcaaccaccgcggtctcagtggtgtacggtacaaacctggtgtgctgggca

SEQ ID NO: 4154 - DNA, 53 bp, synthetic construct
  misc_feature 1..53: note = Synthetic
  source 1..53: mol_type = other DNA
gtctggtcaaccaccgcggtctcagtggtgtacggtacaaacctccacttcca

SEQ ID NO: 4155 - DNA, 55 bp, synthetic construct
  misc_feature 1..55: note = Synthetic
  source 1..55: mol_type = other DNA
gtctggtcaaccaccgcggtctcagtggtgtacggtacaaacctccacttccagg

SEQ ID NO: 4156 - DNA, 56 bp, synthetic construct
  misc_feature 1..56: note = Synthetic
  source 1..56: mol_type = other DNA
tctggtcaaccaccgcggtctcagtggtgtacggtacaaacctccacttccaggag

SEQ ID NO: 4157 - DNA, 53 bp, synthetic construct
  misc_feature 1..53: note = Synthetic
  source 1..53: mol_type = other DNA
gtctggtcaaccaccgcggtctcagtggtgtacggtacaaaccttgcacactg

SEQ ID NO: 4158 - DNA, 55 bp, synthetic construct
  misc_feature 1..55: note = Synthetic
  source 1..55: mol_type = other DNA
gtctggtcaaccaccgcggtctcagtggtgtacggtacaaaccttgcacactggg

SEQ ID NO: 4159 - DNA, 56 bp, synthetic construct
  misc_feature 1..56: note = Synthetic
  source 1..56: mol_type = other DNA
tctggtcaaccaccgcggtctcagtggtgtacggtacaaaccttgcacactgggaa

SEQ ID NO: 4160 - DNA, 48 bp, synthetic construct
  misc_feature 1..48: note = Synthetic
  source 1..48: mol_type = other DNA
atgatcctgacgacggagaccgccgtcgtcgacaagccgcagtttatc

SEQ ID NO: 4161 - DNA, 50 bp, synthetic construct
  misc_feature 1..50: note = Synthetic
  source 1..50: mol_type = other DNA
atgatcctgacgacggagaccgccgtcgtcgacaagccgcagtttatcag

SEQ ID NO: 4162 - DNA, 51 bp, synthetic construct
  misc_feature 1..51: note = Synthetic
  source 1..51: mol_type = other DNA
atgatcctgacgacggagaccgccgtcgtcgacaagccgcagtttatcagg

SEQ ID NO: 4163 - DNA, 47 bp, synthetic construct
  misc_feature 1..47: note = Synthetic
  source 1..47: mol_type = other DNA
atgatcctgacgacggagaccgccgtcgtcgacaagcctgagcaggt

SEQ ID NO: 4164 - DNA, 49 bp, synthetic construct
  misc_feature 1..49: note = Synthetic
  source 1..49: mol_type = other DNA
atgatcctgacgacggagaccgccgtcgtcgacaagcctgagcaggtag

SEQ ID NO: 4165 - DNA, 51 bp, synthetic construct
  misc_feature 1..51: note = Synthetic
  source 1..51: mol_type = other DNA
atgatcctgacgacggagaccgccgtcgtcgacaagcctgagcaggtagat

SEQ ID NO: 4166 - DNA, 47 bp, synthetic construct
  misc_feature 1..47: note = Synthetic
  source 1..47: mol_type = other DNA
atgatcctgacgacggagaccgccgtcgtcgacaagccggcggcagc

SEQ ID NO: 4167 - DNA, 49 bp, synthetic construct
  misc_feature 1..49: note = Synthetic
  source 1..49: mol_type = other DNA
atgatcctgacgacggagaccgccgtcgtcgacaagccggcggcagcat

SEQ ID NO: 4168 - DNA, 51 bp, synthetic construct
  misc_feature 1..51: note = Synthetic
  source 1..51: mol_type = other DNA
atgatcctgacgacggagaccgccgtcgtcgacaagccggcggcagcatag

SEQ ID NO: 4169 - DNA, 48 bp, synthetic construct
  misc_feature 1..48: note = Synthetic
  source 1..48: mol_type = other DNA
atgatcctgacgacggagaccgccgtcgtcgacaagccaagagttgac

SEQ ID NO: 4170 - DNA, 50 bp, synthetic construct
  misc_feature 1..50: note = Synthetic
  source 1..50: mol_type = other DNA
atgatcctgacgacggagaccgccgtcgtcgacaagccaagagttgacac

SEQ ID NO: 4171 - DNA, 51 bp, synthetic construct
  misc_feature 1..51: note = Synthetic
  source 1..51: mol_type = other DNA
atgatcctgacgacggagaccgccgtcgtcgacaagccaagagttgacaca

SEQ ID NO: 4172 - DNA, 48 bp, synthetic construct
  misc_feature 1..48: note = Synthetic
  source 1..48: mol_type = other DNA
atgatcctgacgacggagaccgccgtcgtcgacaagccaagtgatcac

SEQ ID NO: 4173 - DNA, 50 bp, synthetic construct
  misc_feature 1..50: note = Synthetic
  source 1..50: mol_type = other DNA
atgatcctgacgacggagaccgccgtcgtcgacaagccaagtgatcacac

SEQ ID NO: 4174 - DNA, 52 bp, synthetic construct
  misc_feature 1..52: note = Synthetic
  source 1..52: mol_type = other DNA
atgatcctgacgacggagaccgccgtcgtcgacaagccaagtgatcacactt

SEQ ID NO: 4175 - DNA, 47 bp, synthetic construct
  misc_feature 1..47: note = Synthetic
  source 1..47: mol_type = other DNA
atgatcctgacgacggagaccgccgtcgtcgacaagcccccaagtga

SEQ ID NO: 4176 - DNA, 49 bp, synthetic construct
  misc_feature 1..49: note = Synthetic
  source 1..49: mol_type = other DNA
atgatcctgacgacggagaccgccgtcgtcgacaagcccccaagtgatc

SEQ ID NO: 4177 - DNA, 51 bp, synthetic construct
  misc_feature 1..51: note = Synthetic
  source 1..51: mol_type = other DNA
atgatcctgacgacggagaccgccgtcgtcgacaagcccccaagtgatcac

SEQ ID NO: 4178 - DNA, 47 bp, synthetic construct
  misc_feature 1..47: note = Synthetic
  source 1..47: mol_type = other DNA
atgatcctgacgacggagaccgccgtcgtcgacaagccagagacgca

SEQ ID NO: 4179 - DNA, 49 bp, synthetic construct
  misc_feature 1..49: note = Synthetic
  source 1..49: mol_type = other DNA
atgatcctgacgacggagaccgccgtcgtcgacaagccagagacgcaaa

SEQ ID NO: 4180 - DNA, 51 bp, synthetic construct
  misc_feature 1..51: note = Synthetic
  source 1..51: mol_type = other DNA
atgatcctgacgacggagaccgccgtcgtcgacaagccagagacgcaaaca

SEQ ID NO: 4181 - DNA, 46 bp, synthetic construct
  misc_feature 1..46: note = Synthetic
  source 1..46: mol_type = other DNA
ggcttgtcgacgacggcggtctccgtcgtcaggatcatctgacctg

SEQ ID NO: 4182 - DNA, 47 bp, synthetic construct
  misc_feature 1..47: note = Synthetic
  source 1..47: mol_type = other DNA
ggcttgtcgacgacggcggtctccgtcgtcaggatcatctgacctgt

SEQ ID NO: 4183 - DNA, 49 bp, synthetic construct
  misc_feature 1..49: note = Synthetic
  source 1..49: mol_type = other DNA
ggcttgtcgacgacggcggtctccgtcgtcaggatcatctgacctgttt

SEQ ID NO: 4184 - DNA, 47 bp, synthetic construct
  misc_feature 1..47: note = Synthetic
  source 1..47: mol_type = other DNA
ggcttgtcgacgacggcggtctccgtcgtcaggatcattactgtccc

SEQ ID NO: 4185 - DNA, 49 bp, synthetic construct
  misc_feature 1..49: note = Synthetic
  source 1..49: mol_type = other DNA
ggcttgtcgacgacggcggtctccgtcgtcaggatcattactgtcccct

SEQ ID NO: 4186 - DNA, 51 bp, synthetic construct
  misc_feature 1..51: note = Synthetic
  source 1..51: mol_type = other DNA
ggcttgtcgacgacggcggtctccgtcgtcaggatcattactgtccccttc

SEQ ID NO: 4187 - DNA, 47 bp, synthetic construct
  misc_feature 1..47: note = Synthetic
  source 1..47: mol_type = other DNA
ggcttgtcgacgacggcggtctccgtcgtcaggatcatgggctcact

SEQ ID NO: 4188 - DNA, 49 bp, synthetic construct
  misc_feature 1..49: note = Synthetic
  source 1..49: mol_type = other DNA
ggcttgtcgacgacggcggtctccgtcgtcaggatcatgggctcactat

SEQ ID NO: 4189 - DNA, 51 bp, synthetic construct
  misc_feature 1..51: note = Synthetic
  source 1..51: mol_type = other DNA
ggcttgtcgacgacggcggtctccgtcgtcaggatcatgggctcactatgc

SEQ ID NO: 4190 - DNA, 47 bp, synthetic construct
  misc_feature 1..47: note = Synthetic
  source 1..47: mol_type = other DNA
ggcttgtcgacgacggcggtctccgtcgtcaggatcatagtgggact

SEQ ID NO: 4191 - DNA, 50 bp, synthetic construct
  misc_feature 1..50: note = Synthetic
  source 1..50: mol_type = other DNA
ggcttgtcgacgacggcggtctccgtcgtcaggatcatagtgggactttg

SEQ ID NO: 4192 - DNA, 51 bp, synthetic construct
  misc_feature 1..51: note = Synthetic
  source 1..51: mol_type = other DNA
ggcttgtcgacgacggcggtctccgtcgtcaggatcatagtgggactttgg

SEQ ID NO: 4193 - DNA, 47 bp, synthetic construct
  misc_feature 1..47: note = Synthetic
  source 1..47: mol_type = other DNA
ggcttgtcgacgacggcggtctccgtcgtcaggatcatggactttgg

SEQ ID NO: 4194 - DNA, 49 bp, synthetic construct
  misc_feature 1..49: note = Synthetic
  source 1..49: mol_type = other DNA
ggcttgtcgacgacggcggtctccgtcgtcaggatcatggactttggaa

SEQ ID NO: 4195 - DNA, 51 bp, synthetic construct
  misc_feature 1..51: note = Synthetic
  source 1..51: mol_type = other DNA
ggcttgtcgacgacggcggtctccgtcgtcaggatcatggactttggaaat

SEQ ID NO: 4196 - DNA, 47 bp, synthetic construct
  misc_feature 1..47: note = Synthetic
  source 1..47: mol_type = other DNA
ggcttgtcgacgacggcggtctccgtcgtcaggatcatgacaatcga

SEQ ID NO: 4197 - DNA, 49 bp, synthetic construct
  misc_feature 1..49: note = Synthetic
  source 1..49: mol_type = other DNA
ggcttgtcgacgacggcggtctccgtcgtcaggatcatgacaatcgata

SEQ ID NO: 4198 - DNA, 51 bp, synthetic construct
  misc_feature 1..51: note = Synthetic
  source 1..51: mol_type = other DNA
ggcttgtcgacgacggcggtctccgtcgtcaggatcatgacaatcgatagg

SEQ ID NO: 4199 - DNA, 48 bp, synthetic construct
  misc_feature 1..48: note = Synthetic
  source 1..48: mol_type = other DNA
ggcttgtcgacgacggcggtctccgtcgtcaggatcatatcatcttta

SEQ ID NO: 4200 - DNA, 50 bp, synthetic construct
  misc_feature 1..50: note = Synthetic
  source 1..50: mol_type = other DNA
ggcttgtcgacgacggcggtctccgtcgtcaggatcatatcatctttacc

SEQ ID NO: 4201 - DNA, 52 bp, synthetic construct
  misc_feature 1..52: note = Synthetic
  source 1..52: mol_type = other DNA
ggcttgtcgacgacggcggtctccgtcgtcaggatcatatcatctttaccag

SEQ ID NO: 4202 - DNA, 47 bp, synthetic construct
  misc_feature 1..47: note = Synthetic
  source 1..47: mol_type = other DNA
ggcttgtcgacgacggcggtctccgtcgtcaggatcatgctctcatt

SEQ ID NO: 4203 - DNA, 50 bp, synthetic construct
  misc_feature 1..50: note = Synthetic
  source 1..50: mol_type = other DNA
ggcttgtcgacgacggcggtctccgtcgtcaggatcatgctctcattttc

SEQ ID NO: 4204 - DNA, 52 bp, synthetic construct
  misc_feature 1..52: note = Synthetic
  source 1..52: mol_type = other DNA
ggcttgtcgacgacggcggtctccgtcgtcaggatcatgctctcattttcca

SEQ ID NO: 4205 - DNA, 47 bp, synthetic construct
  misc_feature 1..47: note = Synthetic
  source 1..47: mol_type = other DNA
ggcttgtcgacgacggcggtctccgtcgtcaggatcatagtcagtat

SEQ ID NO: 4206 - DNA, 49 bp, synthetic construct
  misc_feature 1..49: note = Synthetic
  source 1..49: mol_type = other DNA
ggcttgtcgacgacggcggtctccgtcgtcaggatcatagtcagtatca

SEQ ID NO: 4207 - DNA, 51 bp, synthetic construct
  misc_feature 1..51: note = Synthetic
  source 1..51: mol_type = other DNA
ggcttgtcgacgacggcggtctccgtcgtcaggatcatagtcagtatcaat

SEQ ID NO: 4208 - DNA, 45 bp, synthetic construct
  misc_feature 1..45: note = Synthetic
  source 1..45: mol_type = other DNA
tcctgacgacggagaccgccgtcgtcgacaagccagagacgcaaa

SEQ ID NO: 4209 - DNA, 46 bp, synthetic construct
  misc_feature 1..46: note = Synthetic
  source 1..46: mol_type = other DNA
tgtcgacgacggcggtctccgtcgtcaggatcatgctctcattttc

SEQ ID NO: 4210 - DNA, 40 bp, synthetic construct
  misc_feature 1..40: note = Synthetic
  source 1..40: mol_type = other DNA
acgacggagaccgccgtcgtcgacaagccagagacgcaaa

SEQ ID NO: 4211 - DNA, 41 bp, synthetic construct
  misc_feature 1..41: note = Synthetic
  source 1..41: mol_type = other DNA
acgacggcggtctccgtcgtcaggatcatgctctcattttc

SEQ ID NO: 4212 - DNA, 49 bp, synthetic construct
  misc_feature 1..49: note = Synthetic
  source 1..49: mol_type = other DNA
atgatcctgacgacggagtccgccgtcgtcgacaagccagagacgcaaa

SEQ ID NO: 4213 - DNA, 50 bp, synthetic construct
  misc_feature 1..50: note = Synthetic
  source 1..50: mol_type = other DNA
ggcttgtcgacgacggcggactccgtcgtcaggatcatgctctcattttc

SEQ ID NO: 4214 - DNA, 45 bp, synthetic construct
  misc_feature 1..45: note = Synthetic
  source 1..45: mol_type = other DNA
tcctgacgacggagtccgccgtcgtcgacaagccagagacgcaaa

SEQ ID NO: 4215 - DNA, 46 bp, synthetic construct
  misc_feature 1..46: note = Synthetic
  source 1..46: mol_type = other DNA
tgtcgacgacggcggactccgtcgtcaggatcatgctctcattttc

SEQ ID NO: 4216 - DNA, 40 bp, synthetic construct
  misc_feature 1..40: note = Synthetic
  source 1..40: mol_type = other DNA
acgacggagtccgccgtcgtcgacaagccagagacgcaaa

SEQ ID NO: 4217 - DNA, 41 bp, synthetic construct
  misc_feature 1..41: note = Synthetic
  source 1..41: mol_type = other DNA
acgacggcggactccgtcgtcaggatcatgctctcattttc

SEQ ID NO: 4218 - DNA, 61 bp, synthetic construct
  misc_feature 1..61: note = Synthetic
  source 1..61: mol_type = other DNA
gggtttgtaccgtacaccactgagaccgcggtggttgaccagacaaaccaagagacgcaaa

SEQ ID NO: 4219 - DNA, 62 bp, synthetic construct
  misc_feature 1..62: note = Synthetic
  source 1..62: mol_type = other DNA
tggtttgtctggtcaaccaccgcggtctcagtggtgtacggtacaaacccgctctcattttc

SEQ ID NO: 4220 - DNA, 56 bp, synthetic construct
  misc_feature 1..56: note = Synthetic
  source 1..56: mol_type = other DNA
tgtaccgtacaccactgagaccgcggtggttgaccagacaaaccaagagacgcaaa

SEQ ID NO: 4221 - DNA, 57 bp, synthetic construct
  misc_feature 1..57: note = Synthetic
  source 1..57: mol_type = other DNA
tgtctggtcaaccaccgcggtctcagtggtgtacggtacaaacccgctctcattttc

SEQ ID NO: 4222 - DNA, 51 bp, synthetic construct
  misc_feature 1..51: note = Synthetic
  source 1..51: mol_type = other DNA
cgtacaccactgagaccgcggtggttgaccagacaaaccaagagacgcaaa

SEQ ID NO: 4223 - DNA, 52 bp, synthetic construct
  misc_feature 1..52: note = Synthetic
  source 1..52: mol_type = other DNA
ggtcaaccaccgcggtctcagtggtgtacggtacaaacccgctctcattttc

SEQ ID NO: 4224 - DNA, 61 bp, synthetic construct
  misc_feature 1..61: note = Synthetic
  source 1..61: mol_type = other DNA
gggtttgtaccgtacaccactgagtccgcggtggttgaccagacaaaccaagagacgcaaa

SEQ ID NO: 4225 - DNA, 62 bp, synthetic construct
  misc_feature 1..62: note = Synthetic
  source 1..62: mol_type = other DNA
tggtttgtctggtcaaccaccgcggactcagtggtgtacggtacaaacccgctctcattttc

SEQ ID NO: 4226 - DNA, 56 bp, synthetic construct
  misc_feature 1..56: note = Synthetic
  source 1..56: mol_type = other DNA
tgtaccgtacaccactgagtccgcggtggttgaccagacaaaccaagagacgcaaa

SEQ ID NO: 4227 - DNA, 57 bp, synthetic construct
  misc_feature 1..57: note = Synthetic
  source 1..57: mol_type = other DNA
tgtctggtcaaccaccgcggactcagtggtgtacggtacaaacccgctctcattttc

SEQ ID NO: 4228 - DNA, 51 bp, synthetic construct
  misc_feature 1..51: note = Synthetic
  source 1..51: mol_type = other DNA
cgtacaccactgagtccgcggtggttgaccagacaaaccaagagacgcaaa

SEQ ID NO: 4229 - DNA, 52 bp, synthetic construct
  misc_feature 1..52: note = Synthetic
  source 1..52: mol_type = other DNA
ggtcaaccaccgcggactcagtggtgtacggtacaaacccgctctcattttc

SEQ ID NO: 4230 - DNA, 49 bp, synthetic construct
  misc_feature 1..49: note = Synthetic
  source 1..49: mol_type = other DNA
aacttcacagaggcttgtcgacgacggcggtctccgtcgtcaggatcat

SEQ ID NO: 4231 - DNA, 51 bp, synthetic construct
  misc_feature 1..51: note = Synthetic
  source 1..51: mol_type = other DNA
gaaacttcacagaggcttgtcgacgacggcggtctccgtcgtcaggatcat

SEQ ID NO: 4232 - DNA, 49 bp, synthetic construct
  misc_feature 1..49: note = Synthetic
  source 1..49: mol_type = other DNA
ggcttgtcgacgacggcggtctccgtcgtcaggatcatctgttgatctc

SEQ ID NO: 4233 - DNA, 51 bp, synthetic construct
  misc_feature 1..51: note = Synthetic
  source 1..51: mol_type = other DNA
ggcttgtcgacgacggcggtctccgtcgtcaggatcatctgttgatctcat

SEQ ID NO: 4234 - DNA, 53 bp, synthetic construct
  misc_feature 1..53: note = Synthetic
  source 1..53: mol_type = other DNA
taccgtacaccactgagaccgcggtggttgaccagacaaacctgtggcagtta

SEQ ID NO: 4235 - DNA, 54 bp, synthetic construct
  misc_feature 1..54: note = Synthetic
  source 1..54: mol_type = other DNA
gtctggtcaaccaccgcggtctcagtggtgtacggtacaaacctgtggcagtta

SEQ ID NO: 4236 - DNA, 55 bp, synthetic construct
  misc_feature 1..55: note = Synthetic
  source 1..55: mol_type = other DNA
taccgtacaccactgagaccgcggtggttgaccagacaaacctgtggcagtttta

SEQ ID NO: 4237 - DNA, 56 bp, synthetic construct
  misc_feature 1..56: note = Synthetic
  source 1..56: mol_type = other DNA
gtctggtcaaccaccgcggtctcagtggtgtacggtacaaacctgtggcagtttta

SEQ ID NO: 4238 - DNA, 54 bp, synthetic construct
  misc_feature 1..54: note = Synthetic
  source 1..54: mol_type = other DNA
taccgtacaccactgagaccgcggtggttgaccagacaaacctcttggaggaaa

SEQ ID NO: 4239 - DNA, 55 bp, synthetic construct
  misc_feature 1..55: note = Synthetic
  source 1..55: mol_type = other DNA
gtctggtcaaccaccgcggtctcagtggtgtacggtacaaacctcttggaggaaa

SEQ ID NO: 4240 - DNA, 52 bp, synthetic construct
  misc_feature 1..52: note = Synthetic
  source 1..52: mol_type = other DNA
gtctggtcaaccaccgcggtctcagtggtgtacggtacaaacctccctgtcc

SEQ ID NO: 4241 - DNA, 51 bp, synthetic construct
  misc_feature 1..51: note = Synthetic
  source 1..51: mol_type = other DNA
taccgtacaccactgagaccgcggtggttgaccagacaaacctccctgtcc

SEQ ID NO: 4242 - DNA, 52 bp, synthetic construct
  misc_feature 1..52: note = Synthetic
  source 1..52: mol_type = other DNA
tctggtcaaccaccgcggtctcagtggtgtacggtacaaacctcctgtacct

SEQ ID NO: 4243 - DNA, 52 bp, synthetic construct
  misc_feature 1..52: note = Synthetic
  source 1..52: mol_type = other DNA
taccgtacaccactgagaccgcggtggttgaccagacaaacctcctgtacct

SEQ ID NO: 4244 - DNA, 56 bp, synthetic construct
  misc_feature 1..56: note = Synthetic
  source 1..56: mol_type = other DNA
gtctggtcaaccaccgcggtctcagtggtgtacggtacaaacctcctacctatcta

SEQ ID NO: 4245 - DNA, 55 bp, synthetic construct
  misc_feature 1..55: note = Synthetic
  source 1..55: mol_type = other DNA
taccgtacaccactgagaccgcggtggttgaccagacaaacctcctacctatcta

SEQ ID NO: 4246 - DNA, 57 bp, synthetic construct
  misc_feature 1..57: note = Synthetic
  source 1..57: mol_type = other DNA
gtctggtcaaccaccgcggtctcagtggtgtacggtacaaacctatggagtaaacct

SEQ ID NO: 4247 - DNA, 55 bp, synthetic construct
  misc_feature 1..55: note = Synthetic
  source 1..55: mol_type = other DNA
taccgtacaccactgagaccgcggtggttgaccagacaaacctatggagtaaacc

SEQ ID NO: 4248 - DNA, 51 bp, synthetic construct
  misc_feature 1..51: note = Synthetic
  source 1..51: mol_type = other DNA
atgatcctgacgacggagaccgccgtcgtcgacaagccatagggtaaacca

SEQ ID NO: 4249 - DNA, 51 bp, synthetic construct
  misc_feature 1..51: note = Synthetic
  source 1..51: mol_type = other DNA
ggcttgtcgacgacggcggtctccgtcgtcaggatcatatagggtaaacca

SEQ ID NO: 4250 - DNA, 48 bp, synthetic construct
  misc_feature 1..48: note = Synthetic
  source 1..48: mol_type = other DNA
ggcttgtcgacgacggcggtctccgtcgtcaggatcatgtgttgcagt

SEQ ID NO: 4251 - DNA, 48 bp, synthetic construct
  misc_feature 1..48: note = Synthetic
  source 1..48: mol_type = other DNA
atgatcctgacgacggagaccgccgtcgtcgacaagccgtgttgcagt

SEQ ID NO: 4252 - DNA, 51 bp, synthetic construct
  misc_feature 1..51: note = Synthetic
  source 1..51: mol_type = other DNA
ggcttgtcgacgacggcggtctccgtcgtcaggatcatctcactgttaggt

SEQ ID NO: 4253 - DNA, 51 bp, synthetic construct
  misc_feature 1..51: note = Synthetic
  source 1..51: mol_type = other DNA
atgatcctgacgacggagaccgccgtcgtcgacaagccctcactgttaggt

SEQ ID NO: 4254 - DNA, 70 bp, synthetic construct
  misc_feature 1..70: note = Synthetic
  source 1..70: mol_type = other DNA
acactctttccctacacgacgctcttccgatctnnnnnnnnnnnnnnntgctggccagtttactaacaat

SEQ ID NO: 4255 - DNA, 74 bp, synthetic construct
  misc_feature 1..74: note = Synthetic
  source 1..74: mol_type = other DNA
acactctttccctacacgacgctcttccgatctnnnnnnnnnnnnnnncagaaagaagatcttatcccatcttg

SEQ ID NO: 4256 - DNA, 51 bp, synthetic construct
  misc_feature 1..51: note = Synthetic
  source 1..51: mol_type = other DNA
tggagttcagacgtgtgctcttccgatctggctacttttgttatttgcatt

SEQ ID NO: 4257 - DNA, 49 bp, synthetic construct
  misc_feature 1..49: note = Synthetic
  source 1..49: mol_type = other DNA
tggagttcagacgtgtgctcttccgatctccagagcagggtcccgcttc

SEQ ID NO: 4258 - DNA, 57 bp, synthetic construct
  misc_feature 1..57: note = Synthetic
  source 1..57: mol_type = other DNA
acactctttccctacacgacgctcttccgatctnnnnacggggctcagtctgaagag

SEQ ID NO: 4259 - DNA, 57 bp, synthetic construct
  misc_feature 1..57: note = Synthetic
  source 1..57: mol_type = other DNA
acactctttccctacacgacgctcttccgatctnnnngccaaggactcaaacccaga

SEQ ID NO: 4260 - DNA, 49 bp, synthetic construct
  misc_feature 1..49: note = Synthetic
  source 1..49: mol_type = other DNA
tggagttcagacgtgtgctcttccgatcttccgtgcgtcagttttacct

SEQ ID NO: 4261 - DNA, 58 bp, synthetic construct
  misc_feature 1..58: note = Synthetic
  source 1..58: mol_type = other DNA
acactctttccctacacgacgctcttccgatctnnnnaactgcttctcctcttgggaa

SEQ ID NO: 4262 - DNA, 51 bp, synthetic construct
  misc_feature 1..51: note = Synthetic
  source 1..51: mol_type = other DNA
tggagttcagacgtgtgctcttccgatcttccttgccagaacctctaaggt

SEQ ID NO: 4263 - DNA, 58 bp, synthetic construct
  misc_feature 1..58: note = Synthetic
  source 1..58: mol_type = other DNA
acactctttccctacacgacgctcttccgatctnnnnatcctctctggctccatcgta

SEQ ID NO: 4264 - DNA, 51 bp, synthetic construct
  misc_feature 1..51: note = Synthetic
  source 1..51: mol_type = other DNA
tggagttcagacgtgtgctcttccgatcttccacttcaggacagcatgttt

SEQ ID NO: 4265 - DNA, 57 bp, synthetic construct
  misc_feature 1..57: note = Synthetic
  source 1..57: mol_type = other DNA
acactctttccctacacgacgctcttccgatctnnnncgccgggaactgccgctggc

SEQ ID NO: 4266 - DNA, 49 bp, synthetic construct
  misc_feature 1..49: note = Synthetic
  source 1..49: mol_type = other DNA
tggagttcagacgtgtgctcttccgatctgaggaggccctcatctggcg

SEQ ID NO: 4267 - DNA, 61 bp, synthetic construct
  misc_feature 1..61: note = Synthetic
  source 1..61: mol_type = other DNA
acactctttccctacacgacgctcttccgatctnnnnaatcaatgtgaagcaaatcgcagc

SEQ ID NO: 4268 - DNA, 52 bp, synthetic construct
  misc_feature 1..52: note = Synthetic
  source 1..52: mol_type = other DNA
tggagttcagacgtgtgctcttccgatcttcgattgtcaggaggatgatgaa

SEQ ID NO: 4269 - DNA, 62 bp, synthetic construct
  misc_feature 1..62: note = Synthetic
  source 1..62: mol_type = other DNA
acactctttccctacacgacgctcttccgatctnnnntccttcttactgtccccttctgggc

SEQ ID NO: 4270 - DNA, 49 bp, synthetic construct
  misc_feature 1..49: note = Synthetic
  source 1..49: mol_type = other DNA
tggagttcagacgtgtgctcttccgatctgcaaacacagcatggacgac

SEQ ID NO: 4271 - DNA, 61 bp, synthetic construct
  misc_feature 1..61: note = Synthetic
  source 1..61: mol_type = other DNA
acactctttccctacacgacgctcttccgatctnnnnacaatcgataggtacctggctgtc

SEQ ID NO: 4272 - DNA, 49 bp, synthetic construct
  misc_feature 1..49: note = Synthetic
  source 1..49: mol_type = other DNA
tggagttcagacgtgtgctcttccgatctaccagccccaagatgactat

SEQ ID NO: 4273 - DNA, 58 bp, synthetic construct
  misc_feature 1..58: note = Synthetic
  source 1..58: mol_type = other DNA
acactctttccctacacgacgctcttccgatctnnnnctgaaaacctgagcttggagg

SEQ ID NO: 4274 - DNA, 54 bp, synthetic construct
  misc_feature 1..54: note = Synthetic
  source 1..54: mol_type = other DNA
tggagttcagacgtgtgctcttccgatctgtctactccagcttaatggaagtgg

SEQ ID NO: 4275 - DNA, 60 bp, synthetic construct
  misc_feature 1..60: note = Synthetic
  source 1..60: mol_type = other DNA
acactctttccctacacgacgctcttccgatctnnnngagaagatgtggaaatgcctcac

SEQ ID NO: 4276 - DNA, 53 bp, synthetic construct
  misc_feature 1..53: note = Synthetic
  source 1..53: mol_type = other DNA
tggagttcagacgtgtgctcttccgatctaatcaacatgaagggttgtgttgt

SEQ ID NO: 4277 - DNA, 58 bp, synthetic construct
  misc_feature 1..58: note = Synthetic
  source 1..58: mol_type = other DNA
acactctttccctacacgacgctcttccgatctnnnngttcccacacatgcgttcctc

SEQ ID NO: 4278 - DNA, 54 bp, synthetic construct
  misc_feature 1..54: note = Synthetic
  source 1..54: mol_type = other DNA
tggagttcagacgtgtgctcttccgatctggcatgaagggttgtttttaattga

SEQ ID NO: 4279 - DNA, 68 bp, synthetic construct
  misc_feature 1..68: note = Synthetic
  source 1..68: mol_type = other DNA
acactctttccctacacgacgctcttccgatctnnnnnnnnnnnnnnngccctgtcctgtacctacct

SEQ ID NO: 4280 - DNA, 58 bp, synthetic construct
  misc_feature 1..58: note = Synthetic
  source 1..58: mol_type = other DNA
acactctttccctacacgacgctcttccgatctnnnnttcagtttggggtatgtgcca

SEQ ID NO: 4281 - DNA, 50 bp, synthetic construct
  misc_feature 1..50: note = Synthetic
  source 1..50: mol_type = other DNA
tggagttcagacgtgtgctcttccgatctctcaaatttacccgtggcagc

SEQ ID NO: 4282 - DNA, 5558 bp, synthetic construct
  misc_feature 1..5558: note = Synthetic
  source 1..5558: mol_type = other DNA
gatgccagctcattcctcccactcatgatctatagatcccccgggctgcaggaattctacccactctgtcgataccccaccgagaccccattggggccaatacgcccgcgtttcttccttttccccaccccaccccccaagttcgggtgaaggcccagggctcgcagccaacgtcggggcggcaagcttacatcgagatcccggcttgtcgacgacggcggactccgtcgtcaggatcatccgtgagcaagggcgaggagctgttcaccggggtggtgcccatcctggtcgagctggacggcgacgtaaacggccacaagttcagcgtgtccggcgagggcgagggcgatgccacctacggcaagctgaccctgaagttcatctgcaccaccggcaagctgcccgtgccctggcccaccctcgtgaccaccctgacctacggcgtgcagtgcttcagccgctaccccgaccacatgaagcagcacgacttcttcaagtccgccatgcccgaaggctacgtccaggagcgcaccatcttcttcaaggacgacggcaactacaagacccgcgccgaggtgaagttcgagggcgacaccctggtgaaccgcatcgagctgaagggcatcgacttcaaggaggacggcaacatcctggggcacaagctggagtacaactacaacagccacaacgtctatatcatggccgacaagcagaagaacggcatcaaggtgaacttcaagatccgccacaacatcgaggacggcagcgtgcagctcgccgaccactaccagcagaacacccccatcggcgacggccccgtgctgctgcccgacaaccactacctgagcacccagtccgccctgagcaaagaccccaacgagaagcgcgatcacatggtcctgctggagttcgtgaccgccgccgggatcactctcggcatggacgagctgtacaagagcggcctgaggagcagagcccaggcgagcaacagcgccgtggacgccaccatgggcgatcgcccgggaattgactagtgcggccgcctaggatccatgccgatagcgttggttgagtggataaccgtattaccgccaagcttatgcatgtgcccgtcagtgggcagagcgcacatcgcccacagtccccgagaagttggggggaggggtcggcaattgaaccggtgcctagagaaggtggcgcggggtaaactgggaaagtgatgtcgtgtactggctccgcctttttcccgagggtgggggagaaccgtatataagtgcagtagtcgccgtgaacgttctttttcgcaacgggtttgccgccagaacacaggtaagtgccgtgtgtggttcccgcgggcctggcctctttacgggttatggcccttgcgtgccttgaattacttccacctggctgcagtacgtgattcttgatcccgagcttcgggttggaagtgggtgggagagttcgaggccttgcgcttaaggagccccttcgcctcgtgcttgagttgaggcctggcctgggcgctggggccgccgcgtgcgaatctggtggcaccttcgcgcctgtctcgctgctttcgataagtctctagccatttaaaatttttgatgacctgctgcgacgctttttttctggcaagatagtcttgtaaatgcgggccaagatctgcacactggtatttcggtttttggggccgcgggcggcgacggggcccgtgcgtcccagcgcacatgttcggcgaggcggggcctgcgagcgcggccaccgagaatcggacgggggtagtctcaagctggccggcctgctctggtgcctggcctcgcgccgccgtgtatcgccccgccctgggcggcaaggctggcccggtcggcaccagttgcgtgagcggaaagatggccgcttcccggccctgctgcagggagctcaaaatggaggacgcggcgctcgggagagcgggcgggtgagtcacccacacaaaggaaaagggcctttccgtcctcagccgtcgcttcatgtgactccacggagtaccgggcgccgtccaggcacctcgattagttctcgcgcttttggagtacgtcgtctttaggttggggggaggggttttatgcgatggagtttccccacactgagtgggtggagactgaagttaggccagcttggcacttgatgtaattctccttggaatttgccctttttgagtttggatcttggttcattctcaagcctcagacagtggttcaaagtttttttcttccatttcaggtgtcgtgagctagcccaccatgaccgagtacaagcccacggtgcgcctcgccacccgcgacgacgtcccccgggccgtacgcaccctcgccgccgcgttcgccgactaccccgccacgcgccacaccgtcgacccggaccgccacatcgagcgggtcaccgagctgcaagaactcttcctcacgcgcgtcgggctcgacatcggcaaggtgtgggtcgcggacgacggcgccgcggtggcggtctggaccacgccggagagcgtcgaagcgggggcggtgttcgccgagatcggcccgcgcatggccgagttgagcggttcccggctggccgcgcagcaacagatggaaggcctcctggcgccgcaccggcccaaggagcccgcgtggttcctggccaccgtcggcgtctcgcccgaccaccagggcaagggtctgggcagcgccgtcgtgctccccggagtggaggcggccgagcgcgccggggtgcccgccttcctggagacctccgcgccccgcaacctccccttctacgagcggctcggcttcaccgtcaccgccgacgtcgaggtgcccgaaggaccgcgcacctggtgcatgacccgcaagcccggtgccggatcgggagagggcagaggaagtctgctaacatgcggtgacgtcgaggagaatcctggcccaccggtcgccaccagcgagctgattaaggagaacatgcacatgaagctgtacatggagggcaccgtggacaaccatcacttcaagtgcacatccgagggcgaaggcaagccctacgagggcacccagaccatgagaatcaaggtggtcgagggcggccctctccccttcgccttcgacatcctggctactagcttcctctacggcagcaagaccttcatcaaccacacccagggcatccccgacttcttcaagcagtccttccctgagggcttcacatgggagagagtcaccacatacgaagacgggggcgtgctgaccgctacccaggacaccagcctccaggacggctgcctcatctacaacgtcaagatcagaggggtgaacttcacatccaacggccctgtgatgcagaagaaaacactcggctgggaggccttcaccgagacgctgtaccccgctgacggcggcctggaaggcagaaacgacatggccctgaagctcgtgggcgggagccatctgatcgcaaacatcaagaccacatatagatccaagaaacccgctaagaacctcaagatgcctggcgtctactatgtggactacagactggaaagaatcaaggaggccaacaacgagacctacgtcgagcagcacgaggtggcagtggccagatactgcgacctccctagcaaactggggcacaagcttaattaagaattctctagaggatccagacatgataagatacattgatgagtttggacaaaccacaactagaatgcagtgaaaaaaatgctttatttgtgaaatttgtgatgctattgctttatttgtaaccattataagctgcaataaacaagttaacaacaacaattgcattcattttatgtttcaggttcagggggaggtgtgggaggttttttaaagcaagtaaaacctctacaaatgtggtatggctgattatgatcctgcaagcctcgtcgccgcggtttattctgttgacaattaatcatcggcatagtatatcggcatagtataatacgacaaggtgaggaactaaaccatgggatcggccattgaacaagatggattgcacgcaggttctccggccgcttgggtggagaggctattcggctatgactgggcacaacagacgatcggctgctctgatgccgccgtgttccggctgtcagcgcaggggcgcccggttctttttgtcaagaccgacctgtccggtgccctgaatgaactgcaggacgaggcagcgcggctatcgtggctggccacgacgggcgttccttgcgcagctgtgctcgacgttgtcactgaagcgggaagggactggctgctattgggcgaagtgccggggcaggatctcctgtcatctcaccttgctcctgccgagaaagtatccatcatggctgatgcaatgcggcggctgcatacgcttgatccggctacctgcccattcgaccaccaagcgaaacatcgcatcgagcgagcacgtactcggatggaagccggtcttgtcgatcaggatgatctggacgaagagcatcaggggctcgcgccagccgaactgttcgccaggctcaaggcgcgcatgcccgacggcgaggatctcgtcgtgacccatggcgatgcctgcttgccgaatatcatggtggaaaatggccgcttttctggattcatcgactgtggccggctgggtgtggcggaccgctatcaggacatagcgttggctacccgtgatattgctgaagagcttggcggcgaatgggctgaccgcttcctcgtgctttacggtatcgccgcccccgattcgcagcgcatcgccttctatcgccttcttgacgagttcttctgagcgggactctggggttcgaataaagaccgaccaagcgacgtctgagagctccctggcgaattcggtaccaataaaagagctttattttcatgatctgtgtgttggtttttggccgcgttgctggcgtttttccataggctccgcccccctgacgagcatcacaaaaatcgacgctcaagtcagaggtggcgaaacccgacaggactataaagataccaggcgtttccccctggaagctccctcgtgcgctctcctgttccgaccctgccgcttaccggatacctgtccgcctttctcccttcgggaagcgtggcgctttctcatagctcacgctgtaggtatctcagttcggtgtaggtcgttcgctccaagctgggctgtgtgcacgaaccccccgttcagcccgaccgctgcgccttatccggtaactatcgtcttgagtccaacccggtaagacacgacttatcgccactggcagcagccactggtaacaggattagcagagcgaggtatgtaggcggtgctacagagttcttgaagtggtggcctaactacggctacactagaagaacagtatttggtatctgcgctctgctgaagccagttaccttcggaaaaagagttggtagctcttgatccggcaaacaaaccaccgctggtagcggtggtttttttgtttgcaagcagcagattacgcgcagaaaaaaaggatctcaagaagatcctttgatcttttctagtgtgcg

SEQ ID NO: 4283 - DNA, 5558 bp, synthetic construct
  misc_feature 1..5558: note = Synthetic
  source 1..5558: mol_type = other DNA
gatgccagctcattcctcccactcatgatctatagatcccccgggctgcaggaattctacccactctgtcgataccccaccgagaccccattggggccaatacgcccgcgtttcttccttttccccaccccaccccccaagttcgggtgaaggcccagggctcgcagccaacgtcggggcggcaagcttacatcgagatcccggcttgtcgacgacggcggtctccgtcgtcaggatcatccgtgagcaagggcgaggagctgttcaccggggtggtgcccatcctggtcgagctggacggcgacgtaaacggccacaagttcagcgtgtccggcgagggcgagggcgatgccacctacggcaagctgaccctgaagttcatctgcaccaccggcaagctgcccgtgccctggcccaccctcgtgaccaccctgacctacggcgtgcagtgcttcagccgctaccccgaccacatgaagcagcacgacttcttcaagtccgccatgcccgaaggctacgtccaggagcgcaccatcttcttcaaggacgacggcaactacaagacccgcgccgaggtgaagttcgagggcgacaccctggtgaaccgcatcgagctgaagggcatcgacttcaaggaggacggcaacatcctggggcacaagctggagtacaactacaacagccacaacgtctatatcatggccgacaagcagaagaacggcatcaaggtgaacttcaagatccgccacaacatcgaggacggcagcgtgcagctcgccgaccactaccagcagaacacccccatcggcgacggccccgtgctgctgcccgacaaccactacctgagcacccagtccgccctgagcaaagaccccaacgagaagcgcgatcacatggtcctgctggagttcgtgaccgccgccgggatcactctcggcatggacgagctgtacaagagcggcctgaggagcagagcccaggcgagcaacagcgccgtggacgccaccatgggcgatcgcccgggaattgactagtgcggccgcctaggatccatgccgatagcgttggttgagtggataaccgtattaccgccaagcttatgcatgtgcccgtcagtgggcagagcgcacatcgcccacagtccccgagaagttggggggaggggtcggcaattgaaccggtgcctagagaaggtggcgcggggtaaactgggaaagtgatgtcgtgtactggctccgcctttttcccgagggtgggggagaaccgtatataagtgcagtagtcgccgtgaacgttctttttcgcaacgggtttgccgccagaacacaggtaagtgccgtgtgtggttcccgcgggcctggcctctttacgggttatggcccttgcgtgccttgaattacttccacctggctgcagtacgtgattcttgatcccgagcttcgggttggaagtgggtgggagagttcgaggccttgcgcttaaggagccccttcgcctcgtgcttgagttgaggcctggcctgggcgctggggccgccgcgtgcgaatctggtggcaccttcgcgcctgtctcgctgctttcgataagtctctagccatttaaaatttttgatgacctgctgcgacgctttttttctggcaagatagtcttgtaaatgcgggccaagatctgcacactggtatttcggtttttggggccgcgggcggcgacggggcccgtgcgtcccagcgcacatgttcggcgaggcggggcctgcgagcgcggccaccgagaatcggacgggggtagtctcaagctggccggcctgctctggtgcctggcctcgcgccgccgtgtatcgccccgccctgggcggcaaggctggcccggtcggcaccagttgcgtgagcggaaagatggccgcttcccggccctgctgcagggagctcaaaatggaggacgcggcgctcgggagagcgggcgggtgagtcacccacacaaaggaaaagggcctttccgtcctcagccgtcgcttcatgtgactccacggagtaccgggcgccgtccaggcacctcgattagttctcgcgcttttggagtacgtcgtctttaggttggggggaggggttttatgcgatggagtttccccacactgagtgggtggagactgaagttaggccagcttggcacttgatgtaattctccttggaatttgccctttttgagtttggatcttggttcattctcaagcctcagacagtggttcaaagtttttttcttccatttcaggtgtcgtgagctagcccaccatgaccgagtacaagcccacggtgcgcctcgccacccgcgacgacgtcccccgggccgtacgcaccctcgccgccgcgttcgccgactaccccgccacgcgccacaccgtcgacccggaccgccacatcgagcgggtcaccgagctgcaagaactcttcctcacgcgcgtcgggctcgacatcggcaaggtgtgggtcgcggacgacggcgccgcggtggcggtctggaccacgccggagagcgtcgaagcgggggcggtgttcgccgagatcggcccgcgcatggccgagttgagcggttcccggctggccgcgcagcaacagatggaaggcctcctggcgccgcaccggcccaaggagcccgcgtggttcctggccaccgtcggcgtctcgcccgaccaccagggcaagggtctgggcagcgccgtcgtgctccccggagtggaggcggccgagcgcgccggggtgcccgccttcctggagacctccgcgccccgcaacctccccttctacgagcggctcggcttcaccgtcaccgccgacgtcgaggtgcccgaaggaccgcgcacctggtgcatgacccgcaagcccggtgccggatcgggagagggcagaggaagtctgctaacatgcggtgacgtcgaggagaatcctggcccaccggtcgccaccagcgagctgattaaggagaacatgcacatgaagctgtacatggagggcaccgtggacaaccatcacttcaagtgcacatccgagggcgaaggcaagccctacgagggcacccagaccatgagaatcaaggtggtcgagggcggccctctccccttcgccttcgacatcctggctactagcttcctctacggcagcaagaccttcatcaaccacacccagggcatccccgacttcttcaagcagtccttccctgagggcttcacatgggagagagtcaccacatacgaagacgggggcgtgctgaccgctacccaggacaccagcctccaggacggctgcctcatctacaacgtcaagatcagaggggtgaacttcacatccaacggccctgtgatgcagaagaaaacactcggctgggaggccttcaccgagacgctgtaccccgctgacggcggcctggaaggcagaaacgacatggccctgaagctcgtgggcgggagccatctgatcgcaaacatcaagaccacatatagatccaagaaacccgctaagaacctcaagatgcctggcgtctactatgtggactacagactggaaagaatcaaggaggccaacaacgagacctacgtcgagcagcacgaggtggcagtggccagatactgcgacctccctagcaaactggggcacaagcttaattaagaattctctagaggatccagacatgataagatacattgatgagtttggacaaaccacaactagaatgcagtgaaaaaaatgctttatttgtgaaatttgtgatgctattgctttatttgtaaccattataagctgcaataaacaagttaacaacaacaattgcattcattttatgtttcaggttcagggggaggtgtgggaggttttttaaagcaagtaaaacctctacaaatgtggtatggctgattatgatcctgcaagcctcgtcgccgcggtttattctgttgacaattaatcatcggcatagtatatcggcatagtataatacgacaaggtgaggaactaaaccatgggatcggccattgaacaagatggattgcacgcaggttctccggccgcttgggtggagaggctattcggctatgactgggcacaacagacgatcggctgctctgatgccgccgtgttccggctgtcagcgcaggggcgcccggttctttttgtcaagaccgacctgtccggtgccctgaatgaactgcaggacgaggcagcgcggctatcgtggctggccacgacgggcgttccttgcgcagctgtgctcgacgttgtcactgaagcgggaagggactggctgctattgggcgaagtgccggggcaggatctcctgtcatctcaccttgctcctgccgagaaagtatccatcatggctgatgcaatgcggcggctgcatacgcttgatccggctacctgcccattcgaccaccaagcgaaacatcgcatcgagcgagcacgtactcggatggaagccggtcttgtcgatcaggatgatctggacgaagagcatcaggggctcgcgccagccgaactgttcgccaggctcaaggcgcgcatgcccgacggcgaggatctcgtcgtgacccatggcgatgcctgcttgccgaatatcatggtggaaaatggccgcttttctggattcatcgactgtggccggctgggtgtggcggaccgctatcaggacatagcgttggctacccgtgatattgctgaagagcttggcggcgaatgggctgaccgcttcctcgtgctttacggtatcgccgcccccgattcgcagcgcatcgccttctatcgccttcttgacgagttcttctgagcgggactctggggttcgaataaagaccgaccaagcgacgtctgagagctccctggcgaattcggtaccaataaaagagctttattttcatgatctgtgtgttggtttttggccgcgttgctggcgtttttccataggctccgcccccctgacgagcatcacaaaaatcgacgctcaagtcagaggtggcgaaacccgacaggactataaagataccaggcgtttccccctggaagctccctcgtgcgctctcctgttccgaccctgccgcttaccggatacctgtccgcctttctcccttcgggaagcgtggcgctttctcatagctcacgctgtaggtatctcagttcggtgtaggtcgttcgctccaagctgggctgtgtgcacgaaccccccgttcagcccgaccgctgcgccttatccggtaactatcgtcttgagtccaacccggtaagacacgacttatcgccactggcagcagccactggtaacaggattagcagagcgaggtatgtaggcggtgctacagagttcttgaagtggtggcctaactacggctacactagaagaacagtatttggtatctgcgctctgctgaagccagttaccttcggaaaaagagttggtagctcttgatccggcaaacaaaccaccgctggtagcggtggtttttttgtttgcaagcagcagattacgcgcagaaaaaaaggatctcaagaagatcctttgatcttttctagtgtgcg

SEQ ID NO: 4284 - DNA, 5568 bp, synthetic construct
  misc_feature 1..5568: note = Synthetic
  source 1..5568: mol_type = other DNA
gatgccagctcattcctcccactcatgatctatagatcccccgggctgcaggaattctacccactctgtcgataccccaccgagaccccattggggccaatacgcccgcgtttcttccttttccccaccccaccccccaagttcgggtgaaggcccagggctcgcagccaacgtcggggcggcaagcttacatcgagatcccggtttgtctggtcaaccaccgcggactcagtggtgtacggtacaaaccccgtgagcaagggcgaggagctgttcaccggggtggtgcccatcctggtcgagctggacggcgacgtaaacggccacaagttcagcgtgtccggcgagggcgagggcgatgccacctacggcaagctgaccctgaagttcatctgcaccaccggcaagctgcccgtgccctggcccaccctcgtgaccaccctgacctacggcgtgcagtgcttcagccgctaccccgaccacatgaagcagcacgacttcttcaagtccgccatgcccgaaggctacgtccaggagcgcaccatcttcttcaaggacgacggcaactacaagacccgcgccgaggtgaagttcgagggcgacaccctggtgaaccgcatcgagctgaagggcatcgacttcaaggaggacggcaacatcctggggcacaagctggagtacaactacaacagccacaacgtctatatcatggccgacaagcagaagaacggcatcaaggtgaacttcaagatccgccacaacatcgaggacggcagcgtgcagctcgccgaccactaccagcagaacacccccatcggcgacggccccgtgctgctgcccgacaaccactacctgagcacccagtccgccctgagcaaagaccccaacgagaagcgcgatcacatggtcctgctggagttcgtgaccgccgccgggatcactctcggcatggacgagctgtacaagagcggcctgaggagcagagcccaggcgagcaacagcgccgtggacgccaccatgggcgatcgcccgggaattgactagtgcggccgcctaggatccatgccgatagcgttggttgagtggataaccgtattaccgccaagcttatgcatgtgcccgtcagtgggcagagcgcacatcgcccacagtccccgagaagttggggggaggggtcggcaattgaaccggtgcctagagaaggtggcgcggggtaaactgggaaagtgatgtcgtgtactggctccgcctttttcccgagggtgggggagaaccgtatataagtgcagtagtcgccgtgaacgttctttttcgcaacgggtttgccgccagaacacaggtaagtgccgtgtgtggttcccgcgggcctggcctctttacgggttatggcccttgcgtgccttgaattacttccacctggctgcagtacgtgattcttgatcccgagcttcgggttggaagtgggtgggagagttcgaggccttgcgcttaaggagccccttcgcctcgtgcttgagttgaggcctggcctgggcgctggggccgccgcgtgcgaatctggtggcaccttcgcgcctgtctcgctgctttcgataagtctctagccatttaaaatttttgatgacctgctgcgacgctttttttctggcaagatagtcttgtaaatgcgggccaagatctgcacactggtatttcggtttttggggccgcgggcggcgacggggcccgtgcgtcccagcgcacatgttcggcgaggcggggcctgcgagcgcggccaccgagaatcggacgggggtagtctcaagctggccggcctgctctggtgcctggcctcgcgccgccgtgtatcgccccgccctgggcggcaaggctggcccggtcggcaccagttgcgtgagcggaaagatggccgcttcccggccctgctgcagggagctcaaaatggaggacgcggcgctcgggagagcgggcgggtgagtcacccacacaaaggaaaagggcctttccgtcctcagccgtcgcttcatgtgactccacggagtaccgggcgccgtccaggcacctcgattagttctcgcgcttttggagtacgtcgtctttaggttggggggaggggttttatgcgatggagtttccccacactgagtgggtggagactgaagttaggccagcttggcacttgatgtaattctccttggaatttgccctttttgagtttggatcttggttcattctcaagcctcagacagtggttcaaagtttttttcttccatttcaggtgtcgtgagctagcccaccatgaccgagtacaagcccacggtgcgcctcgccacccgcgacgacgtcccccgggccgtacgcaccctcgccgccgcgttcgccgactaccccgccacgcgccacaccgtcgacccggaccgccacatcgagcgggtcaccgagctgcaagaactcttcctcacgcgcgtcgggctcgacatcggcaaggtgtgggtcgcggacgacggcgccgcggtggcggtctggaccacgccggagagcgtcgaagcgggggcggtgttcgccgagatcggcccgcgcatggccgagttgagcggttcccggctggccgcgcagcaacagatggaaggcctcctggcgccgcaccggcccaaggagcccgcgtggttcctggccaccgtcggcgtctcgcccgaccaccagggcaagggtctgggcagcgccgtcgtgctccccggagtggaggcggccgagcgcgccggggtgcccgccttcctggagacctccgcgccccgcaacctccccttctacgagcggctcggcttcaccgtcaccgccgacgtcgaggtgcccgaaggaccgcgcacctggtgcatgacccgcaagcccggtgccggatcgggagagggcagaggaagtctgctaacatgcggtgacgtcgaggagaatcctggcccaccggtcgccaccagcgagctgattaaggagaacatgcacatgaagctgtacatggagggcaccgtggacaaccatcacttcaagtgcacatccgagggcgaaggcaagccctacgagggcacccagaccatgagaatcaaggtggtcgagggcggccctctccccttcgccttcgacatcctggctactagcttcctctacggcagcaagaccttcatcaaccacacccagggcatccccgacttcttcaagcagtccttccctgagggcttcacatgggagagagtcaccacatacgaagacgggggcgtgctgaccgctacccaggacaccagcctccaggacggctgcctcatctacaacgtcaagatcagaggggtgaacttcacatccaacggccctgtgatgcagaagaaaacactcggctgggaggccttcaccgagacgctgtaccccgctgacggcggcctggaaggcagaaacgacatggccctgaagctcgtgggcgggagccatctgatcgcaaacatcaagaccacatatagatccaagaaacccgctaagaacctcaagatgcctggcgtctactatgtggactacagactggaaagaatcaaggaggccaacaacgagacctacgtcgagcagcacgaggtggcagtggccagatactgcgacctccctagcaaactggggcacaagcttaattaagaattctctagaggatccagacatgataagatacattgatgagtttggacaaaccacaactagaatgcagtgaaaaaaatgctttatttgtgaaatttgtgatgctattgctttatttgtaaccattataagctgcaataaacaagttaacaacaacaattgcattcattttatgtttcaggttcagggggaggtgtgggaggttttttaaagcaagtaaaacctctacaaatgtggtatggctgattatgatcctgcaagcctcgtcgccgcggtttattctgttgacaattaatcatcggcatagtatatcggcatagtataatacgacaaggtgaggaactaaaccatgggatcggccattgaacaagatggattgcacgcaggttctccggccgcttgggtggagaggctattcggctatgactgggcacaacagacgatcggctgctctgatgccgccgtgttccggctgtcagcgcaggggcgcccggttctttttgtcaagaccgacctgtccggtgccctgaatgaactgcaggacgaggcagcgcggctatcgtggctggccacgacgggcgttccttgcgcagctgtgctcgacgttgtcactgaagcgggaagggactggctgctattgggcgaagtgccggggcaggatctcctgtcatctcaccttgctcctgccgagaaagtatccatcatggctgatgcaatgcggcggctgcatacgcttgatccggctacctgcccattcgaccaccaagcgaaacatcgcatcgagcgagcacgtactcggatggaagccggtcttgtcgatcaggatgatctggacgaagagcatcaggggctcgcgccagccgaactgttcgccaggctcaaggcgcgcatgcccgacggcgaggatctcgtcgtgacccatggcgatgcctgcttgccgaatatcatggtggaaaatggccgcttttctggattcatcgactgtggccggctgggtgtggcggaccgctatcaggacatagcgttggctacccgtgatattgctgaagagcttggcggcgaatgggctgaccgcttcctcgtgctttacggtatcgccgcccccgattcgcagcgcatcgccttctatcgccttcttgacgagttcttctgagcgggactctggggttcgaataaagaccgaccaagcgacgtctgagagctccctggcgaattcggtaccaataaaagagctttattttcatgatctgtgtgttggtttttggccgcgttgctggcgtttttccataggctccgcccccctgacgagcatcacaaaaatcgacgctcaagtcagaggtggcgaaacccgacaggactataaagataccaggcgtttccccctggaagctccctcgtgcgctctcctgttccgaccctgccgcttaccggatacctgtccgcctttctcccttcgggaagcgtggcgctttctcatagctcacgctgtaggtatctcagttcggtgtaggtcgttcgctccaagctgggctgtgtgcacgaaccccccgttcagcccgaccgctgcgccttatccggtaactatcgtcttgagtccaacccggtaagacacgacttatcgccactggcagcagccactggtaacaggattagcagagcgaggtatgtaggcggtgctacagagttcttgaagtggtggcctaactacggctacactagaagaacagtatttggtatctgcgctctgctgaagccagttaccttcggaaaaagagttggtagctcttgatccggcaaacaaaccaccgctggtagcggtggtttttttgtttgcaagcagcagattacgcgcagaaaaaaaggatctcaagaagatcctttgatcttttctagtgtgcg

SEQ ID NO: 4285 - DNA, 5568 bp, synthetic construct
  misc_feature 1..5568: note = Synthetic
  source 1..5568: mol_type = other DNA
gatgccagctcattcctcccactcatgatctatagatcccccgggctgcaggaattctacccactctgtcgataccccaccgagaccccattggggccaatacgcccgcgtttcttccttttccccaccccaccccccaagttcgggtgaaggcccagggctcgcagccaacgtcggggcggcaagcttacatcgagatcccggtttgtctggtcaaccaccgcggtctcagtggtgtacggtacaaaccccgtgagcaagggcgaggagctgttcaccggggtggtgcccatcctggtcgagctggacggcgacgtaaacggccacaagttcagcgtgtccggcgagggcgagggcgatgccacctacggcaagctgaccctgaagttcatctgcaccaccggcaagctgcccgtgccctggcccaccctcgtgaccaccctgacctacggcgtgcagtgcttcagccgctaccccgaccacatgaagcagcacgacttcttcaagtccgccatgcccgaaggctacgtccaggagcgcaccatcttcttcaaggacgacggcaactacaagacccgcgccgaggtgaagttcgagggcgacaccctggtgaaccgcatcgagctgaagggcatcgacttcaaggaggacggcaacatcctggggcacaagctggagtacaactacaacagccacaacgtctatatcatggccgacaagcagaagaacggcatcaaggtgaacttcaagatccgccacaacatcgaggacggcagcgtgcagctcgccgaccactaccagcagaacacccccatcggcgacggccccgtgctgctgcccgacaaccactacctgagcacccagtccgccctgagcaaagaccccaacgagaagcgcgatcacatggtcctgctggagttcgtgaccgccgccgggatcactctcggcatggacgagctgtacaagagcggcctgaggagcagagcccaggcgagcaacagcgccgtggacgccaccatgggcgatcgcccgggaattgactagtgcggccgcctaggatccatgccgatagcgttggttgagtggataaccgtattaccgccaagcttatgcatgtgcccgtcagtgggcagagcgcacatcgcccacagtccccgagaagttggggggaggggtcggcaattgaaccggtgcctagagaaggtggcgcggggtaaactgggaaagtgatgtcgtgtactggctccgcctttttcccgagggtgggggagaaccgtatataagtgcagtagtcgccgtgaacgttctttttcgcaacgggtttgccgccagaacacaggtaagtgccgtgtgtggttcccgcgggcctggcctctttacgggttatggcccttgcgtgccttgaattacttccacctggctgcagtacgtgattcttgatcccgagcttcgggttggaagtgggtgggagagttcgaggccttgcgcttaaggagccccttcgcctcgtgcttgagttgaggcctggcctgggcgctggggccgccgcgtgcgaatctggtggcaccttcgcgcctgtctcgctgctttcgataagtctctagccatttaaaatttttgatgacctgctgcgacgctttttttctggcaagatagtcttgtaaatgcgggccaagatctgcacactggtatttcggtttttggggccgcgggcggcgacggggcccgtgcgtcccagcgcacatgttcggcgaggcggggcctgcgagcgcggccaccgagaatcggacgggggtagtctcaagctggccggcctgctctggtgcctggcctcgcgccgccgtgtatcgccccgccctgggcggcaaggctggcccggtcggcaccagttgcgtgagcggaaagatggccgcttcccggccctgctgcagggagctcaaaatggaggacgcggcgctcgggagagcgggcgggtgagtcacccacacaaaggaaaagggcctttccgtcctcagccgtcgcttcatgtgactccacggagtaccgggcgccgtccaggcacctcgattagttctcgcgcttttggagtacgtcgtctttaggttggggggaggggttttatgcgatggagtttccccacactgagtgggtggagactgaagttaggccagcttggcacttgatgtaattctccttggaatttgccctttttgagtttggatcttggttcattctcaagcctcagacagtggttcaaagtttttttcttccatttcaggtgtcgtgagctagcccaccatgaccgagtacaagcccacggtgcgcctcgccacccgcgacgacgtcccccgggccgtacgcaccctcgccgccgcgttcgccgactaccccgccacgcgccacaccgtcgacccggaccgccacatcgagcgggtcaccgagctgcaagaactcttcctcacgcgcgtcgggctcgacatcggcaaggtgtgggtcgcggacgacggcgccgcggtggcggtctggaccacgccggagagcgtcgaagcgggggcggtgttcgccgagatcggcccgcgcatggccgagttgagcggttcccggctggccgcgcagcaacagatggaaggcctcctggcgccgcaccggcccaaggagcccgcgtggttcctggccaccgtcggcgtctcgcccgaccaccagggcaagggtctgggcagcgccgtcgtgctccccggagtggaggcggccgagcgcgccggggtgcccgccttcctggagacctccgcgccccgcaacctccccttctacgagcggctcggcttcaccgtcaccgccgacgtcgaggtgcccgaaggaccgcgcacctggtgcatgacccgcaagcccggtgccggatcgggagagggcagaggaagtctgctaacatgcggtgacgtcgaggagaatcctggcccaccggtcgccaccagcgagctgattaaggagaacatgcacatgaagctgtacatggagggcaccgtggacaaccatcacttcaagtgcacatccgagggcgaaggcaagccctacgagggcacccagaccatgagaatcaaggtggtcgagggcggccctctccccttcgccttcgacatcctggctactagcttcctctacggcagcaagaccttcatcaaccacacccagggcatccccgacttcttcaagcagtccttccctgagggcttcacatgggagagagtcaccacatacgaagacgggggcgtgctgaccgctacccaggacaccagcctccaggacggctgcctcatctacaacgtcaagatcagaggggtgaacttcacatccaacggccctgtgatgcagaagaaaacactcggctgggaggccttcaccgagacgctgtaccccgctgacggcggcctggaaggcagaaacgacatggccctgaagctcgtgggcgggagccatctgatcgcaaacatcaagaccacatatagatccaagaaacccgctaagaacctcaagatgcctggcgtctactatgtggactacagactggaaagaatcaaggaggccaacaacgagacctacgtcgagcagcacgaggtggcagtggccagatactgcgacctccctagcaaactggggcacaagcttaattaagaattctctagaggatccagacatgataagatacattgatgagtttggacaaaccacaactagaatgcagtgaaaaaaatgctttatttgtgaaatttgtgatgctattgctttatttgtaaccattataagctgcaataaacaagttaacaacaacaattgcattcattttatgtttcaggttcagggggaggtgtgggaggttttttaaagcaagtaaaacctctacaaatgtggtatggctgattatgatcctgcaagcctcgtcgccgcggtttattctgttgacaattaatcatcggcatagtatatcggcatagtataatacgacaaggtgaggaactaaaccatgggatcggccattgaacaagatggattgcacgcaggttctccggccgcttgggtggagaggctattcggctatgactgggcacaacagacgatcggctgctctgatgccgccgtgttccggctgtcagcgcaggggcgcccggttctttttgtcaagaccgacctgtccggtgccctgaatgaactgcaggacgaggcagcgcggctatcgtggctggccacgacgggcgttccttgcgcagctgtgctcgacgttgtcactgaagcgggaagggactggctgctattgggcgaagtgccggggcaggatctcctgtcatctcaccttgctcctgccgagaaagtatccatcatggctgatgcaatgcggcggctgcatacgcttgatccggctacctgcccattcgaccaccaagcgaaacatcgcatcgagcgagcacgtactcggatggaagccggtcttgtcgatcaggatgatctggacgaagagcatcaggggctcgcgccagccgaactgttcgccaggctcaaggcgcgcatgcccgacggcgaggatctcgtcgtgacccatggcgatgcctgcttgccgaatatcatggtggaaaatggccgcttttctggattcatcgactgtggccggctgggtgtggcggaccgctatcaggacatagcgttggctacccgtgatattgctgaagagcttggcggcgaatgggctgaccgcttcctcgtgctttacggtatcgccgcccccgattcgcagcgcatcgccttctatcgccttcttgacgagttcttctgagcgggactctggggttcgaataaagaccgaccaagcgacgtctgagagctccctggcgaattcggtaccaataaaagagctttattttcatgatctgtgtgttggtttttggccgcgttgctggcgtttttccataggctccgcccccctgacgagcatcacaaaaatcgacgctcaagtcagaggtggcgaaacccgacaggactataaagataccaggcgtttccccctggaagctccctcgtgcgctctcctgttccgaccctgccgcttaccggatacctgtccgcctttctcccttcgggaagcgtggcgctttctcatagctcacgctgtaggtatctcagttcggtgtaggtcgttcgctccaagctgggctgtgtgcacgaaccccccgttcagcccgaccgctgcgccttatccggtaactatcgtcttgagtccaacccggtaagacacgacttatcgccactggcagcagccactggtaacaggattagcagagcgaggtatgtaggcggtgctacagagttcttgaagtggtggcctaactacggctacactagaagaacagtatttggtatctgcgctctgctgaagccagttaccttcggaaaaagagttggtagctcttgatccggcaaacaaaccaccgctggtagcggtggtttttttgtttgcaagcagcagattacgcgcagaaaaaaaggatctcaagaagatcctttgatcttttctagtgtgcg

SEQ ID NO: 4286 - DNA, 40 bp, synthetic construct
  misc_feature 1..40: note = Synthetic
  source 1..40: mol_type = other DNA
tggggcccagactgagcacgaacaccatcatcaccatcat

SEQ ID NO: 4287 - DNA, 40 bp, synthetic construct
  misc_feature 1..40: note = Synthetic
  source 1..40: mol_type = other DNA
tggggcccagactgagcacgaccaccatcatcaccatcat

SEQ ID NO: 4288 - DNA, 40 bp, synthetic construct
  misc_feature 1..40: note = Synthetic
  source 1..40: mol_type = other DNA
tggggcccagactgagcacgaactccatcatcaccatcat

SEQ ID NO: 4289 - DNA, 40 bp, synthetic construct
  misc_feature 1..40: note = Synthetic
  source 1..40: mol_type = other DNA
tggggcccagactgagcacgaacaccctcatcaccatcat

SEQ ID NO: 4290 - DNA, 40 bp, synthetic construct
  misc_feature 1..40: note = Synthetic
  source 1..40: mol_type = other DNA
tggggcccagactgagcacgcacaccatcatcaccatcat

SEQ ID NO: 4291 - DNA, 131 bp, synthetic construct
  misc_feature 1..131: note = Synthetic
  source 1..131: mol_type = other DNA
ggcccagactgagcacgtgagttttagagctagaaatagcaagttaaaataaggctagtccgttatcaacttgaaaaagtggcaccgagtcggtgcaaatgatggtgatgatggtgttcgtgctcagtctg

SEQ ID NO: 4292 - DNA, 130 bp, synthetic construct
  misc_feature 1..130: note = Synthetic
  source 1..130: mol_type = other DNA
gtcaaccagtatcccggtgcgttttagagctagaaatagcaagttaaaataaggctagtccgttatcaacttgaaaaagtggcaccgagtcggtgcaacaccatcatcaccatcatttccgggatactgg

SEQ ID NO: 4293 - RNA, 37 nt, synthetic construct
  misc_feature 1..37: note = Synthetic
  source 1..37: mol_type = other RNA
cactggatcgatcgatgctgactgtagctacagctca

SEQ ID NO: 4294 - RNA, 37 nt, synthetic construct
  misc_feature 1..37: note = Synthetic
  source 1..37: mol_type = other RNA
gtcagcatcgatcgatccagtgtgtagctacagctca

SEQ ID NO: 4295 - DNA, 37 bp, synthetic construct
  misc_feature 1..37: note = Synthetic
  source 1..37: mol_type = other DNA
tgagctgtagctacagtcagcatcgatcgatccagtg

SEQ ID NO: 4296 - DNA, 37 bp, synthetic construct
  misc_feature 1..37: note = Synthetic
  source 1..37: mol_type = other DNA
tgagctgtagctacacactggatcgatcgatgctgac

SEQ ID NO: 4297 - DNA, 37 bp, synthetic construct
  misc_feature 1..37: note = Synthetic
  source 1..37: mol_type = other DNA
acatcgatgtcgagtcactggatcgatcgatgctgac

SEQ ID NO: 4298 - DNA, 100 bp, synthetic construct
  misc_feature 1..100: note = Synthetic
  source 1..100: mol_type = other DNA
gagcagagccaggaaccccaggtttgtctggtcaaccaccgcggtctcagtggtgtacggtacaaacctggcggtggggggccagcggcagttcccggcg

SEQ ID NO: 4299 - DNA, 100 bp, synthetic construct
  misc_feature 1..100: note = Synthetic
  source 1..100: mol_type = other DNA
gagcagagccaggaaccccaggtttgtctggtcaaccaccgcggtctcagtggtgtacggtacaaacctggcggtggggggcccgcggcagttcccggcg

SEQ ID NO: 4300 - DNA, 100 bp, synthetic construct
  misc_feature 1..100: note = Synthetic
  source 1..100: mol_type = other DNA
gagcagagccaggaaccccaggtttgtctggtcaaccaccgcggtctcagtggtgtacggtacaaacctggcggtggggggccagcggccgttcccggcg

SEQ ID NO: 4301 - DNA, 100 bp, synthetic construct
  misc_feature 1..100: note = Synthetic
  source 1..100: mol_type = other DNA
gagcagagccaggaaccccaggtttgtctggtcaaccaccgcggtctcagtggtgtacggtacaaacctggcggtggtgggccagcggcagttcccggcg

SEQ ID NO: 4302 - DNA, 100 bp, synthetic construct
  misc_feature 1..100: note = Synthetic
  source 1..100: mol_type = other DNA
gagcagagccaggaacccctggtttgtctggtcaaccaccgcggtctcagtggtgtacggtacaaacctggcggtggggggccagcggcagttcccggcg

SEQ ID NO: 4303 - DNA, 100 bp, synthetic construct
  misc_feature 1..100: note = Synthetic
  source 1..100: mol_type = other DNA
gagcagagccaggaaccccaggtttgtctggtcaaccaccgcggtctcagtggtgtacggtacaaacctggcggtggggggccagcggcaggtcccggcg

SEQ ID NO: 4304 - DNA, 100 bp, synthetic construct
  misc_feature 1..100: note = Synthetic
  source 1..100: mol_type = other DNA
gagcagagccaggaaccccaggtttgtctggtcacccaccgcggtctcagtggtgtacggtacaaacctggcggtggggggccagcggcagttcccggcg

SEQ ID NO: 4305 - DNA, 100 bp, synthetic construct
  misc_feature 1..100: note = Synthetic
  source 1..100: mol_type = other DNA
gagcagagccaggaaccccaggtttgtctggtcaaccaccgcggtctcagtggtgtacggtacaaacctggcggtggggggccagctgcagttcccggcg

SEQ ID NO: 4306 - DNA, 100 bp, synthetic construct
  misc_feature 1..100: note = Synthetic
  source 1..100: mol_type = other DNA
gagcagagccaggaaccccaggtttgtctggtcaaccaccgcggtctcagtggtgtacggtacaaacctggcggcggggggccagcggcagttcccggcg

SEQ ID NO: 4307 - DNA, 100 bp, synthetic construct
  misc_feature 1..100: note = Synthetic
  source 1..100: mol_type = other DNA
gagcagagccaggaaccccaggtttgtctggtcacccaccgcggtctcagtggtgtacggtacaaacctggcggtggggggcccgcggcagttcccggcg

SEQ ID NO: 4308 - DNA, 120 bp, synthetic construct
  misc_feature 1..120: note = Synthetic
  source 1..120: mol_type = other DNA
gggcttctgggtttgagtccttggcaagcccagggcttgtcgacgacggcggtctccgtcgtcaggatcatccacttccaggagtcgctgtgccccgatgcacactgggaagtccgcagc

SEQ ID NO: 4309 - DNA, 120 bp, synthetic construct
  misc_feature 1..120: note = Synthetic
  source 1..120: mol_type = other DNA
gggcttctgggtttgagtccttggcaagcccagggcttgtcgacgacggcggtctccgtcgtcaggatcatccacttccaggagtcgctgtgccccgctgcacactgggaagtccgcagc

SEQ ID NO: 4310 - DNA, 120 bp, synthetic construct
  misc_feature 1..120: note = Synthetic
  source 1..120: mol_type = other DNA
gggcttctgggtttgagtccttggcaagcccagggcttgtcgacgacggcggcctccgtcgtcaggatcatccacttccaggagtcgctgtgccccgatgcacactgggaagtccgcagc

SEQ ID NO: 4311 - DNA, 120 bp, synthetic construct
  misc_feature 1..120: note = Synthetic
  source 1..120: mol_type = other DNA
gggcttctgggtttgagtccttggcaagcccagggcttgtcgacgacggcggtctccgtcgtcaggatcatgcacttccaggagtcgctgtgccccgatgcacactgggaagtccgcagc

SEQ ID NO: 4312 - DNA, 120 bp, synthetic construct
  misc_feature 1..120: note = Synthetic
  source 1..120: mol_type = other DNA
gggcttctgggtttgcgtccttggcaagcccagggcttgtcgacgacggcggtctccgtcgtcaggatcatccacttccaggagtcgctgtgccccgatgcacactgggaagtccgcagc

SEQ ID NO: 4313 - DNA, 120 bp, synthetic construct
  misc_feature 1..120: note = Synthetic
  source 1..120: mol_type = other DNA
gggcttctgggtttgagtccttggcaagcccagggcttgtcgacgacggcggtctccgtcgtcaggatcatccacttccaggagtcgctgtgccccgatgcacactgggaaggccgcagc

SEQ ID NO: 4314 - DNA, 120 bp, synthetic construct
  misc_feature 1..120: note = Synthetic
  source 1..120: mol_type = other DNA
gggcttctgggtttgagtccttagcaagcccagggcttgtcgacgacggcggtctccgtcgtcaggatcatccacttccaggagtcgctgtgccccgatgcacactgggaagtccgcagc

SEQ ID NO: 4315 - DNA, 120 bp, synthetic construct
  misc_feature 1..120: note = Synthetic
  source 1..120: mol_type = other DNA
gggcttctgggtttgagtccttggcaagcccagggcttgtcgacgacggcggtctccgtcgtccggatcatccacttccaggagtcgctgtgccccgatgcacactgggaagtccgcagc

SEQ ID NO: 4316 - DNA, 120 bp, synthetic construct
  misc_feature 1..120: note = Synthetic
  source 1..120: mol_type = other DNA
gggcttctgggtttgagtccttggcaagcccagggcttgtcgacgactgcggtctccgtcgtcaggatcatccacttccaggagtcgctgtgccccgatgcacactgggaagtccgcagc

SEQ ID NO: 4317 - DNA, 120 bp, synthetic construct
  misc_feature 1..120: note = Synthetic
  source 1..120: mol_type = other DNA
gggcttctgggtttgagtccttcgcaagcccagggcttgtcgacgacggcggtctccgtcgtcaggatcatccacttccaggagtcgctgtgccccgatgcacactgggaagtccgcagc

SEQ ID NO: 4318 - DNA, 118 bp, synthetic construct
  misc_feature 1..118: note = Synthetic
  source 1..118: mol_type = other DNA
tctgtcgataccccacggtcaatccttggggcccagactgagcacgaggtttgtctggtcaaccaccgcggtctcagtggtgtacggtacaaaccttcctctctggctccatcgtaag

SEQ ID NO: 4319 - DNA, 112 bp, synthetic construct
  misc_feature 1..112: note = Synthetic
  source 1..112: mol_type = other DNA
tctgtcgataccccacggtcaatccttggggcccagactgagcacgggcttgtcgacgacggcggtctccgtggtgtacggtacaaaccttcctctctggctccatcgtaag

SEQ ID NO: 4320 - DNA, 118 bp, synthetic construct
  misc_feature 1..118: note = Synthetic
  source 1..118: mol_type = other DNA
tctgtcgataccccacggtcaatccttggggcccagactgagcacgaggtttgtctggtcaaccaccgcggtctcagtggggtacggtacaaaccttcctctctggctccatcgtaag

SEQ ID NO: 4321 - DNA, 118 bp, synthetic construct
  source 1..118: mol_type = other DNA
tctgtcgataccccacggtcaatccttggggcccagactgagcacgaggtttgtctggtcaaccaccgcggtctcagtggcgtacggtacaaaccttcctctctggctccatcgtaag

SEQ ID NO: 4322 - DNA, 118 bp, synthetic construct
  source 1..118: mol_type = other DNA
tctgtcgataccccacggtcaatccttggggcccagactgagcacgaggtgcgtctggtcaaccaccgcggtctcagtggtgtacggtacaaaccttcctctctggctccatcgtaag

SEQ ID NO: 4323 - DNA, 118 bp, synthetic construct
  source 1..118: mol_type = other DNA
tctgtcgataccccacggtcaatccttggggcccagactgagcacgggcttgtcgacgacggcggtctccgtctggtcaaccaccgcggtctcagtggtgtacggtacaaaccttcct

SEQ ID NO: 4324 - DNA, 116 bp, synthetic construct
  misc_feature 1..116: note = Synthetic
  source 1..116: mol_type = other DNA
tctgtcgataccccacggtcaatccttggggcccagactgagcacgaggtttgtctggtcaaccaccgcggtctcagtggtgtacggtagcaccgactcggtgccactttttcaag

SEQ ID NO: 4325 - DNA, 118 bp, synthetic construct
  misc_feature 1..118: note = Synthetic
  source 1..118: mol_type = other DNA
tctgtcgataccccacggtcaatccttggggcccagactgagcacgaggtttgtctgttcaaccaccgcggtctcagtggtgtacggtacaaaccttcctctctggctccatcgtaag

SEQ ID NO: 4326 - DNA, 118 bp, synthetic construct
  misc_feature 1..118: note = Synthetic
  source 1..118: mol_type = other DNA
tctgtcgataccccacggtcaatccttggggcccagactgagcacggggtttgtctggtcaaccaccgcggtctcagtggtgtacggtacaaaccttcctctctggctccatcgtaag

SEQ ID NO: 4327 - DNA, 118 bp, synthetic construct
  misc_feature 1..118: note = Synthetic
  source 1..118: mol_type = other DNA
tctgtcgataccccacggtcaatccttggggcccagactgagcacgaggtttgtctggtcaaccaccgcggtctcagtggtgtacggcacaaaccttcctctctggctccatcgtaag

SEQ ID NO: 4328 - DNA, 118 bp, synthetic construct
  misc_feature 1..118: note = Synthetic
  source 1..118: mol_type = other DNA
tctgtcgataccccccggtcaatccttggggcccagactgagcacgaggtttgtctggtcaaccaccgcggtctcagtggtgtacggtacaaaccttcctctctggctccatcgtaag

SEQ ID NO: 4329 - DNA, 118 bp, synthetic construct
  misc_feature 1..118: note = Synthetic
  source 1..118: mol_type = other DNA
tctgtcgataccccacggtcaatccttggggcccagactgagcacgaggtttgtctggtcaaccaccgcggtctcagtggtgtacgggacaaaccttcctctctggctccatcgtaag

SEQ ID NO: 4330 - DNA, 118 bp, synthetic construct
  misc_feature 1..118: note = Synthetic
  source 1..118: mol_type = other DNA
tctgtcgataccccacggtcaatccttggggcccagactgagcacgaggtttgtctggtcaaccaccgcggtctcagcggtgtacggtacaaaccttcctctctggctccatcgtaag

SEQ ID NO: 4331 - DNA, 118 bp, synthetic construct
  misc_feature 1..118: note = Synthetic
  source 1..118: mol_type = other DNA
tctgtcgataccccacggtcaatccttggggcccagactgagcacgaggtttgtctggtcaaccaccgcggtctcagtggtgtactgtacaaaccttcctctctggctccatcgtaag

SEQ ID NO: 4332 - DNA, 118 bp, synthetic construct
  misc_feature 1..118: note = Synthetic
  source 1..118: mol_type = other DNA
tctgtcgataccccacggtcaatccttggggcccagactgagcacgaggtttgtctggtcaaccaccgcggcctcagtggtgtacggtacaaaccttcctctctggctccatcgtaag

SEQ ID NO: 4333 - DNA, 118 bp, synthetic construct
  misc_feature 1..118: note = Synthetic
  source 1..118: mol_type = other DNA
tctgtcgataccccacggtcaatccttggggcccagactgagcacgaggtttgtctggtcaaccaccgcggtctcagtggtgtacgttacaaaccttcctctctggctccatcgtaag

SEQ ID NO: 4334 - DNA, 100 bp, synthetic construct
  misc_feature 1..100: note = Synthetic
  source 1..100: mol_type = other DNA
caaggacgcgactctcccgacgcggggaggctattctgcccataacaccatcatcaccatcatttgagaaaggctggccagggtggcatctgaatgggac

SEQ ID NO: 4335 - DNA, 78 bp, synthetic construct
  misc_feature 1..78: note = Synthetic
  source 1..78: mol_type = other DNA
caaggacgcgactctcccgacaacaccatcatcaccatctgattttacttagaacctgggtttcccctggagaaaggc

SEQ ID NO: 4336 - DNA, 100 bp, synthetic construct
  misc_feature 1..100: note = Synthetic
  source 1..100: mol_type = other DNA
caaggacgcgactctcccgacgcggggaggctattctgcccataacaccatcatcaccatcatttgagaaaggctggccagggcggcatctgaatgggac

SEQ ID NO: 4337 - DNA, 100 bp, synthetic construct
  misc_feature 1..100: note = Synthetic
  source 1..100: mol_type = other DNA
gcctcagctcagctgcctccttggaggcagctacctacctctccagtcctgtcttcagagaagagatggaagacacctgcgctattgacacttttctcag

SEQ ID NO: 4338 - DNA, 53 bp, synthetic construct
  misc_feature 1..53: note = Synthetic
  source 1..53: mol_type = other DNA
gcctcagctcagctgcctccttggaggcagctacctacctctccagtcctgtc

SEQ ID NO: 4339 - DNA, 71 bp, synthetic construct
  misc_feature 1..71: note = Synthetic
  source 1..71: mol_type = other DNA
gcctcagctcagctgcctccttggaggcagctacctacctctccagtcctgtcctggggccattttctcag

SEQ ID NO: 4340 - DNA, 94 bp, synthetic construct
  misc_feature 1..94: note = Synthetic
  source 1..94: mol_type = other DNA
gcctcagctcagctgcctccttggaggcagctacctacctctccagtcctgtcctggggccagaagagatggaagacactattgacacttttct

SEQ ID NO: 4341 - DNA, 67 bp, synthetic construct
  source 1..67: mol_type = other DNA
gcctcagctcagctgcctccttggaggcagctacctacctctccagtcctgtctccacttttctcag

SEQ ID NO: 4342 - DNA, 120 bp, synthetic construct
  source 1..120: mol_type = other DNA
gaaacgcaccagacggccgcgtcagagcagctcaggttctgggaggtttgtctggtcaaccaccgcggtctcagtggtgtacggtacaaacctgaacacctaggacgcaccattctcaca

SEQ ID NO: 4343 - DNA, 120 bp, synthetic construct
  source 1..120: mol_type = other DNA
gaaacgcaccagacagccgcgtcagagcagctcaggttctgggaggtttgtctggtcaaccaccgcggtctcagtggtgtacggtacaaacctgaacacctaggacgcaccattctcaca

SEQ ID NO: 4344 - DNA, 120 bp, synthetic construct
  source 1..120: mol_type = other DNA
gaaacgcaccagacagccgcgtccgagcagctcaggttctgggaggtttgtctggtcaaccaccgcggtctcagtggtgtacggtacaaacctgaacacctaggacgcaccattctcaca

SEQ ID NO: 4345 - DNA, 120 bp, synthetic construct
  source 1..120: mol_type = other DNA
gaaacgcaccagacagccgcgtcagagcagctcagtttctgggaggtttgtctggtcaaccaccgcggtctcagtggtgtacggtacaaacctgaacacctaggacgcaccattctcaca

SEQ ID NO: 4346 - DNA, 120 bp, synthetic construct
  source 1..120: mol_type = other DNA
gaaacgcaccagacagccgcgtcagagcagctcaggttctgggaggtttgtctggtcaaccaccgctgtctcagtggtgtacggtacaaacctgaacacctaggacgcaccattctcaca

SEQ ID NO: 4347 - DNA, 120 bp, synthetic construct
  misc_feature 1..120: note = Synthetic
  source 1..120: mol_type = other DNA
gaaacgcaccagacagccgcgtccgagcagctcagtttctgggaggtttgtctggtcaaccaccgcggtctcagtggtgtacggtacaaacctgaacacctaggacgcaccattctcaca

SEQ ID NO: 4348 - DNA, 105 bp, synthetic construct
  source 1..105: mol_type = other DNA
gaaacgcaccagacagccgcgtcagagcagctcaggttctgggaggtttgtctggtcaaccaccgcggtctcagtggtgaacacctaggacgcaccattctcaca

SEQ ID NO: 4349 - DNA, 100 bp, synthetic construct
  source 1..100: mol_type = other DNA
caaggacgcgactctcccgacgcggggaggctattctgcccataacaccatcatcaccatcatttagagacgcaaacacagccaccacccaagtgatcac

SEQ ID NO: 4350 - DNA, 40 bp, synthetic construct
  source 1..40: mol_type = other DNA
cccaggtttgtctggtcaaccaccgcggtctcagtggtgt

SEQ ID NO: 4351 - DNA, 29 bp, synthetic construct
  source 1..29: mol_type = other DNA
cccaggtttgaccgcggtctcagtggtgt

SEQ ID NO: 4352 - DNA, 40 bp, synthetic construct
  source 1..40: mol_type = other DNA
tccaggtttgtctggtcaaccaccgcggtctcagtggtgt

SEQ ID NO: 4353 - DNA, 60 bp, synthetic construct
  source 1..60: mol_type = other DNA
ttggcaagcccagggcttgtcgacgacggcggtctccgtcgtcaggatcatccacttcca

SEQ ID NO: 4354 - DNA, 60 bp, synthetic construct
  source 1..60: mol_type = other DNA
ttggcaagcccagggcttgtcgacgacggcggtctccgtcgtcaggatcatgcacttcca

SEQ ID NO: 4355 - DNA, 60 bp, synthetic construct
  source 1..60: mol_type = other DNA
tcatgcccctggctctcctgcgacgacggcggtctccgtcgtcaggatcatccacttcca

SEQ ID NO: 4356 - DNA, 73 bp, synthetic construct
  source 1..73: mol_type = other DNA
ggggcccagactgagcacgtgatggcagaggaaaggatatgtgcagctcctgcaccgggatactggttgacaa

SEQ ID NO: 4357 - DNA, 73 bp, synthetic construct
  source 1..73: mol_type = other DNA
ttgtcaaccagtatcccggtgcaggagctgcacatatcctttcctctgccatcacgtgctcagtctgggcccc

SEQ ID NO: 4358 - DNA, 76 bp, synthetic construct
  source 1..76: mol_type = other DNA
ggggcccagactgagcacgggcttgtcgacgacggcggtctccgtcgtcaggatcatccgggatactggttgacaa

SEQ ID NO: 4359 - DNA, 76 bp, synthetic construct
  source 1..76: mol_type = other DNA
ttgtcaaccagtatcccggatgatcctgacgacggagaccgccgtcgtcgacaagcccgtgctcagtctgggcccc
